United States Patent Application Publication US 2025/0235397 A1 - sequence listing, part 10

SEQ ID NO: 13 - DNA, 3578914 bp, Bacillus pumilus (residues 1-1,789,457 of 3,578,914)
  source 1..3578914: mol_type = genomic DNA
cactatttgccggtgtagctcaattggtagagcaactgacttgtaatcagtaggttgggggttcaagtcctcttgccggcactgtttttcaaatgtggaggggtagcgaagtggctaaacgcggcggactgtaaatccgctccctccgggttcggcggttcgaatccgcccccctccaccatttttgttttcataggggcatagtttaaaggtagaacagaggtctccaaaacctccggtgtgggttcgattcctactgcccctgccaattttcttaatatgattcataacatctatggcggttgtggcgaagtggttaacgcaccagattgtggctctggcactcgtgggttcgattcccatcaatcgccccattttattattgggctatagccaagcggtaaggcaacggactttgactccgtcatgcgttggttcgaatccagctagcccagttgatttgcggaagtagttcagtggtagaacaccaccttgccaaggtgggggtcgcgggttcgaatcccgtcttccgctccaataatggcggcatagccaagtggtaaggcagaggtctgcaaaacctttatccccggttcaaatccgggtgtcgccttttttgaaaagactgccggggtggtggaattggcagacacacaggacttaaaatcctgcggtaggtgactaccgtgccggttcaagtccggccctcggcaccattattttttatcataagttgcgctctttaatgatcatgccggtgtggcggaattggcagacgcgcacgactcaaaatcgtgttcctcacggagtgccggttcgaccccggccaccggtatctattaaaagtttcatgatcggtttttaccgtcaacctaacgtttcaccacaatggtgaaacgtttttttgtggttaaaacgagttatttagatgaaaatataaacttattagaaaattttgcaacagcagttaggcgttataccactcttatcaagcagatcgtgtagctgcctcccttgaaataagaaggaccaatagaatatgctaaatgctgaaggaaatgaattcgcctaggattatctcgattttgaacatggcttgtgtttagatgactacggggagacattctcagcagctgaaagcgtgtatcatgttgaagatcgttgggagaactacgataaaatcaaagaagtgattcaaaagcgttatatagattgggtgaatcaacgttaaggaatctagttttgtttcaataaataagagcttctcatctttgtactgtttcatgtggacgttacaattggctataggagataaatagaatgaatttagaggggcggagttgttatcttgcaaacgaagacgatattacagaccatcattgaagacgagggatcacgagattatccgctttttagacagtactgtgagagaaaagagcaaggtctgcgtaaagatgcgcttaaagttcttcagtcctttattgcggagatgaaggagaacgaggttgaagcaaagcgtgtatttgttgcttggctgtttgagtggattgaacggtttgaggatggtcatcatttgcttgtgtttccattggtaaatgaggtgattcagcccgttctgcaagagtgggagaatgttgatccaatggatgtaagaccatatcgctggcaaggcttgttcgtgcatcagggagaagggctgccttacttattgaaggcactagagcttggaggcagcaaggagcagcgtgtgatagttcaaatttgtgaaacctatctatcggccttatggtattcgtttcatcatatacatgaagatctttatttaagcacctatgagaaagatcaagagcgaattcagggcattgaagttgtcatgacactgattgaagataagaggattcgtaccaatgttgaaaaacattcggtctactataaccagcttttatcggattggaaggaatttcagcagacggagacaagaggctttatgaaatggtgtgcggagcgtaagaagccctatgagtgggtagaggcattttattatcatcaatagatgaggaaacggcagaattcattctgccgtttttttacttatgccatattcgctctatttctacatgatctggtctaaaatattgcagaacatagacatctggattgcttagctgctcccactccttgattccaatcgtgggatcggcgtgttttagaagcaggctcataatattgccatgtgtggcgaataaggtatgatcttttcctaattttatttgttcatagagtgcctctacaatacggttcatcgcttcttggctcgattctccgccttcacaggtcatatgtaagtccgaaaaactgagctttagtttctcataccaatcgtccattggtttgctgcttaacacacgttcagaaagacgctgatcaatttgtacctcgagctgtttcacatgagcaaggggctcagtggtttggatcgctcgtttataaggacttgagatgatctgattgaggtggataccggaaaagaactgtgctagttcgtgagattgtgcgatgccttgaggcgttaaagacgcatcctcggattgtccatttgcttggcaatgtctgacgatataatatgttttcatggggcacacctctcatcgagtataaaaaaatcatccaggattggatgaggattcatgaaggtctaggttcatttgttcggatctgtttctttatagggatctgttagcttcgaggttaggtctaagttgaacaaaaaatcgtctacggtgtctgtgccaaagggaagtgtggagaagttgattgggatgctgtcttcttgcttttctgaagtgacctgctgtttaggctgcttttttctccagtacttaaacaagcgcatgtaaagcccccttttctatgaaaaagatggatttatacataatatacggggagagttgtccaggcgtcaaatgttttcttagagaacgatgaaaagagccacaggaaagtgcagctctttttgtacatttacatagcacgacgtaatgctttcagcactttacgttcgcattttaagttatatcgcttgtgatggagtttatccgtgttacatctgccaatgacttgtctgacatctggatgataaatgatgagattcctgaaagttggatcatttaataacgtgtgaaaccagctgaattttttgagatgtgctgcatttctagagatatcctcttcatctatctgtagaaaagggatatacacagcaagtgaaaagatatcgaaaatgaatcccattttggttcctccccccatattatttcctacgcttagaagaaggaaaggtttcattcaataaacctttaaaaacaatcccagtgcatcaaccattcttttttgtctttgtcgtaatagaaatacatcgtgccgttatcaccaatcataaaccgaggtttttcttctggggcgatttgcagcatgaattctcctggttgatgacggggtggggattgaatatatgcgccatattcatcgatttttgtgaatgaataatttgtgtattgcttaaagaagtgttctgtcgcttcctcactttcatttacttctgataaatcaacatatgaccacgctttttcccagcaagggaagtccttttgctcactttcattccattgaatttgaaagggtttgagtcctctcacttcttctggagtctcaactacttctaatccttccatagttgcgtattcaataagcttccagccttcgccgtttttggtgatatcaatcggaagtgctttctgattaagaaagatttgaatcatcttacattcattgaatccgttcattcctcctggcacttcaggtaaataaatttgtaagatcggaatcatgacaccatcttgatctgctggccagcctttatctccattacttatccctcaatctttagcctgcaatgtgggcatcttgaaacgtgccattgatattgcctgagacaatgatgacatgtccccaaaataaatcaccgtcatgacagtacacttcaaactctccatctgggtaagcatgaaggctttcgagtgagatgcggctcataaattgatccagtgtgagctcttcttgtttttcagcggagtcatcttgtgcctgccagtctttagctagttcaatcagttgatttgctgcaaatgatttaatggaagagttccatgtggtctgctcttccatgagttgtctagcggttcgaagagagtcgtttactttttcatcttcttcgaggttgaagtagagcaggcactcttgattgctccattggatcgttgtttcaaataagtctagtcctttcactaattcaaaggtgcccagcatgtcatcatggtaaaagacaggtttttgagcttcttctcgtatctcttgaagctcttgatcctgtgtatctgtatcgatgagtgatacaagcatgaactcaccttcaccttttcggacctgaagtgtcacgattgattctttatgtaattgtgcctgcttttcccgcaagccctcttcatctgttaaccagcagagccttatgttttcggttgtgatgaggtctttttccttccatgcaatcagtggaatagaagcggtccaaagagattcctgtccggtttttcctgcgcctactcctgaaggtcctgtgacagcaatgatgtgatctatttctgctgaaaatctttctttaaatgcgcttatttgtttgttattcttcatgtgatgtcctccagcctgctttttgaaaatctatatctttatcacaccgcacatcagaaggagaaatcaagcttttttttgcttaaaacttttttagattgacagagggagagaaaatacatggattgctggagggtgagtcacaataaaaaacaaatggattatgtatcgaattttgtataaatttaggtgaaagagtcgaaaggcctaggtgattcttccttttctttataattactttgacacgaatagatgaaaaaagtaaagtagtactgagtgacttacaaacccttcttcatccactaaaacatgaagtgtgtgtaaatgaagtgtaaatggatatttttccttttatttactcgtattttttttgaaacctttgaagcttctcatacgttatattaaaggagcacatatgtccggcggaaacagagcatcggaatgcttggtgaagaagatttacatttgcaaaatcaatgtaaattttttatgatttcatttatatcagaacgataactaagaaagaagaggttttatgaaaaaaatatttgcgaacaaatatagcttttttgtattggctgtccttttattttgggcgaaatcgtacgctgcctacaaaatggactttaatttaggagtgaaaggttcttttcaagaggggcttctcttattaaatccatttagttcagccattgtgtttttgggactggctctctttttgaagggtcgtaaatctgccattgttttaattgttattgactttattatgaccgcacttttatatgcgaatgtagcgtactaccgtttctttgatgactttttgactttctccacaatgaagcaagcaggcaatcttggaggaggcatgactggcggtgtattatctagtattaagccgcatgaccttttgtatttccttgatatcattatcttgattgcgattgtgatttggagaccagaagtgaaaaaattccaaatgaaaaagacatttgcactgctgattgtggctgcaggtgtaggactgttttttgtaaaccttcatttagctgaaaaggaccgtccagaattattaacaagaacatttgatcacaagtatgttgtcaaatacttaggtgtttataattatacgatttatgacggagtacaatcagcacaaaatgcaacacaggtagcaaatgcgagcagtgaagatttaacggatgttgtaaactatacggcttctcactatgcgaagccaaacgcagagtattttggtaaagcaaaagggaaaaacatcattaaaatccatttagaaagcttccagtctttcttaattgactacaaactaaatggagaagaagtgacgccgtttttaaacaaactagctcatggtaaagaggattttacgtatttcgacaacttcttccatcagacaggtcaaggaaagacagctgatgctgagctaatgatggataatagtatgttcggcttgccagagggagcagcgtttgtgacaaaaggtgaaaatacttaccaatcactccctgccatcctagatcaaaaagcagactatacgagcgcagtgcttcacggggactataaatctttctggaaccgtgacacgatttataagcatatgggatatgatcaattcttcgatgcttcatattacaacatggatgaagaaaatcttgtgaatatgggtctgaaggataaaccattcttcaaagaatcaatcccgatgctagaatcaatgaaaaagccattttatgcacatttaatgacattgactaatcactatccatttaatttagatgaaaaagatgcgacaattgctaaggcaacaactggtgacaaaacagtagataactacttccaaacagcaagatatctagatgagtcattagagcaattctttaaagacttgaaaaaatcaggtatgtataaagactcggtcattttattatatggtgatcacaacggtatttctgaaaaccataaccgtgcaatgagcgaaattcaagggaaagaaattacaccttatcaaaatgcacaaaaccagcgtgtaccactcatgattcgtattcctggcaaacagggcggcgtgaaccatacgtatggtggtgaagtagacgtgatgcctacgcttcttcacttacaaggtattgattcaaatgagtatgtgaattttggaacagatctattctctaagaagcatgatcaaactgttgcattccgtaacggaaactatgtgacaccaaaatatacactcgtagataacactgtctacgatacaaaaacaggtaaagttgtgaaacaaaataaaaagacagaggcgattaaagcccgtgtcgataatcagttaagcctttcagataaagtgctttatagggatcttcttcgattccataagctgtctgactttaaaccagtgaatccatctgattatttctatggtaaatcaaaagaaaaagaagaggattcttctgctaagtaactgagttttgggcaagcacagaagggtgcttgcctttttctctctcaccgcttgatttgttggcaaaatatgtttatatttagggtgatacaagcgtgaggctggcgtgcagctggcggaactcatttcgtcctaggggatttcaggaggagcttatgacaacaaatacaaaaacacaaaaaaagaaatcagaattatggggctggatcaaagccatcttaatcgcattcattgctgtttttatcattcgtaactttttattcgccccttacattgtcaaagggtcttccatgtacccgacattgcatgatacagagcgggtttttgtgaataaaacggttgattacttcggcgattacaaacggggacagatcattgttcttgatggggaagaccgcagcactcattatgtaaaacgattaattggtttacccggtgataaaattgaaatgaaaaatgaccagctatatgtcaatggtcaaaaagtggcggagccttacttagcgtcaaagaaaaagaaagcagccgcagatgggaccttgctgacacctgattttggtcctcttaccgttccaaaaggaaagtattttgtcatgggtgacaatcgtcaaaactcaatggacagccgcaatggcttaggtctttttacaaaaagtgatattcaaggaacgacttcatttgtgttttatcctttccaagacattcgactactcaatgattaatgactcataaaaaaaagcacacagaggtgtgctttttctatttcattcagcatggctttttgtgatcgcctgttcaagatctgcaaggatgtcttcaatcgcttctgttccaacagataaacgaatgagttctggtgtgacgcctgtcgctttttgttctgcttcacttaattgttgatgcgttgtgctggcaggatgaataatcagtgatttggaatcgcccacattggcaaggtgtgagaaaagcttaacagaatcaatgagctttttaccagctgctcgtccacctttaataccgaatgtgagaatggcgccttgtccttttggcaaatacgtttgagcaagctcataagattcatggctttcaagacctgggtagcttacccaatctacaagagggtgatcttgtaaaaattgcgctgtttttaatgcattttcactatgacgctcgagacgcagatgcaaagtttctaggccttgcagaagtaaaaatgagttaaatggagacagggcagcccctaaatcccgcaagagctgtacacgtgcttttgtgatataagcggcttctccaattgcttcggtatacgtcaggccgtggtaacttggatctggttcagtcagccctttgaacttatcactgtcagcccaaggaaactggccgctatcgacaatgacaccgccgattgatgtaccatgaccgccaatgaatttcgtagcggaatggacgacaatgtctgcaccaaactcgatcggtcttaataaataggggcttgcgagcgtattgtccacaataagcggaatatggtgcttgtgtgcaatggctgagacggcttcaatatgtagaatgtcgcctttaggattcccaatgctttctgcatacactgccttcgttttgtctgtaatcgctgcttcgagttcttccaagttggatgaatcaacaaatttcactgtaatgccgagctttttgagtgtatgggcaaataaattgtacgtgcctccataaaggctgctggaggatacaatttcgtcaccagctcctgcaatgtttaaaatagaataagttgtcgctgcttgtccagaagagacagcaagtgcaccaatgccgccctcaagctcagcgatccgtttttcaaagacgtcatttgtagggttcataatgcgagaataaatatttccgggttcctgcagtccaaataaattcgccgcatgctcactatctctaaaaccgaaagagcttgtttggtaaataggcacggctcttgaataggttgctgaatcaagctcctgacctgcgtgaatggcttttgtttctaaacggaatggacgttcttctgacatgtgtgtatcctccttttgttagataaaaccaactactttgataagaaatatttaataagactataaatcttgtttcatgcctggtcaatcattttttagataaatctgaaaaaataatcaataaagttgatgaacttttttatttcaattggaagggtgtatatgttggtgaaaagagagattgtttccttagagagtgcggatcagtttttttagaaagcagtaaatcattcaagtgttgtttgaaaagatcatgctcgccatcgttttagatgaattctataagcgattaatctaatttgaagcacaaagaatgccagctggtggaatcatgggtaaagcctatgctgtaggttgctttttcatagaaaggagcgtgtcatatgttggatgttactcaagaaggcaagggcttttttcccaatgatctctcttgtatatacatattttaagtgacaagagaagaaggaaaatatgctcacttttttgtcggaattatcagtaaatatttcataaatggagttataacgacatataatcaggacttttatatctgatatatcgggggaattctttctatctcacaaaaaagaaagaatatataaaggagatgataaaaatggcctatttcaaaaaaagaagaaaaaagatggttcaattgccattatatgggtttggtggttcttatggagtgaaaaaacctagttaataagagaggggttatacacttaaaagtgaataattgaataaaaagtcacattttacccaaaagtatgttcggtcaaaaatgggatcttctgttgatgtttggagagtgacgcctatgatacgatcatcataagctgggaggtgaaaagtatgacttatgcagcgccgcaagttgactattccactatggaacctgctattatggaccaagcttggttcttagtatttgttgctgtccttcttggactgggagcaacagttgttctaggagcagcagtttggtgtttagcaaacggcaagggtagctttacaggagccgttcagtgggaaagtggcttaaaagtccaaattgaatgtaagtagctatacttaggattcatctttttacttctatgaaatgacaccagggctaaaccgtctgtggcgggcggtttagcctgatctgtttttaaagaatatgcagacacttggaggttatatgtttacgatcgagaatttaactaagacgtataaaaataacgtgactgctgtcaatgattttcatctacagatcgaccctcatcaaatcgttgctgttgctggaccgaatggttccggtaaaacaacgatgattaactgtatactcggcatcattaagcatacagaaggaacgattctcttgcaggacgtcacaaatgacgaaccatcctttaaaaaacaagtagcctatgttccagatgatctgctactccctgaagctttgactggtgctgaatatttagattttgtttcttctatgtatgaatgtaaaacaattcatagaagaaatcaactaattgaactgtttgatatggactcggctttatcaagaccgatcgaaacctattcacatggtatgaaaaaaaagacacagctgattgccgcctttatgcttgatagtcaattggtgatcatggatgagccctttagaggacttgatattgaagcggttataaacacaaagaaactgatgaagcgttatgccgagcaccatggtgcgatcttgctttcaacgcatgatatgctttcagcggaagagctgtgccacaaaatcgccattatttctaagggaaataaaatggatgaaggaacggtctcagccttaaaggagaagtatcaatcaagcacattggaacaggtgtttctgaaagcttcaatgttaagtgataggggtgcacattttgatgaaatcattaatcatttctagaatgatgcttaaaatgtggcagcaggagatgtataagctctttgatactcagacgaagcggatcattgtgatcttattctttttgtttgccgtcacaatgggcgccatcatcggatacagttttacgggtgtctttatgaaggctttcttaaatggagatgaacgttcacttggattactcgttgtgtcaatggcgatcaatgcatccatatttacaagcttgttattcattttgatcaaggtcagaacgcctgagcaagaccgtttttctatgcagctcagctggttcccgctttctacctttcagaaaagccttggatactttattccgatgatgacagtggtggcaggacttgtgttattttttatcggtatcctgcttttacctaactttattgcccagggaataggtattttctttatctttacgttctttttaatggtgattttgcaatcgctttttgtcttaatgcttctgcaactcatttataatattacctatttggtcgttctgaaattaaaattaccgttgcaaaaatttgcagcgatctttgttttattagcactggttgtggcgtatggaatgacgcattttgatatcagtcaaattcagcaatcatatatacagtttgattatcatttgatgtattttacagcaccgtttttcttagcggctcaaggaatgtctcctgaaggggtaaattatgcaatcttgatcctgttcatccttttatcggcgggcggcgcatttctttctcttgcgatgatgccaattatggcagagaaaaaagcgttaacctttttaaacaaactgccgttctcttcttcaaaaaaatggtcacttattgtaaaggaaatgaaatcacaggtgcgaaatgaagaaaacattttaaactttctcattctcctcattgtgatcttattcgtccgttatcagtttggattccgctttgaagaagaagcgttttttgttctctgcgctcttgctggattaaccgccttcaattcatttggcaatgataaacgaatgctggggatgtacaaaacatttggcctaagatcgtgggaagtggctctgtataagtttatcgggcttttgcttgttggtatactgcaaattgcgttattcatgctgacaacgctgacgcttcctgatcagatttggaacgtattgattggggctgctgttttatgcaatgccactgcgcttttttatgtggtaggtattttacttccgcttgaccgaaacaatccctacacaggtattttttcatttggagcacttattttactcatgattccgattgtttttattggaaactatgtcataggggagtcgagtcaaacacttcagtggctgcttgtagctgcatttgaaggtctgctcatctttgccatatacaaaggtttttcatggaggtattcacatgattcaacttcttaacaataagctaaagattgagcgggtaccggcactcgcgccgtatgtgaccttacaaaagaggcatctcactgatacgcagtatggaagcacactcccgattaatgaaagtgcctatcatatgttaacgaaagtagatggcaaaaggacagaagcaagtattaccgcagagctcgccgatttgtttcaggtcgatgaatctgtgatttctcgtgacttttatcaactgataatggggttaaatcagcatcacttgctgtctattcattatcaatcaccatatcggattgtgacagcctgttgtcaatttttcaaacagtatcaagtgaaaatgaaggaacgatttgattgcactggtcactcgttcctgcacattttggggacggctttgctcatggtgacgcgtaaaatcatctttttctggatgctttttatggtcatggcagggatcgcttttttattcattcctgaccagtcgattgcagccattgcgatttattttactattatttattttggattaattaccgggaccgccttacatgaggcagcacacggctatgcgcatcggaaatttgcgggacgggatggtcctcaaggcttttttgcgagtgatatgatgtctgtgaaatttgtgagacctgtattagatccgtttcagaaaaagcaagtatggattactctgcttgggccgcttgtcccgggtgtgatcggggcagcagggatcattgtgaccgtattatttctgaaagaaaatccaatttcgacaggtttctttattttttcaatcacgtattttattcaattactctatcttcttccatttatgggggatggtaaatccattatgaagcagctattgcttgggggaatgggaggacaacgatcatgaacgtacaggcgatgaaacaaggcgctattgttggtggctttctaggatttttaggctttccgatgctgacaattggtgtattgttctatcatttatttcaatcaaaaacgaatgatgccttattatttaacagtctcgcttttgagatggaaggttcatccgcatttacttttcagatcaagccaaacttttttatttatatgattgtgatttttgccgcgagttttctcattgtggctttcttatcagcaatgaagcagaaaaaagcaaaagattaggagaatcctcctaatctttttttgtataatcaaccaaattttagtataatagaaaaaacatcaaaggggatctcaatgttaaaaaaatggagtgttcttatattcactgtttttctattagcaggatgcggcgagaaggccgaagaaaccacgacaaccgagaagacggtatctacaataaacacggagtctgctactaagaagcaagtaaccatcgaacaaatgaaactgacaaaaaaagaaaaaaacttactagaagcatcagcccctaatgaaatggtggctttgacactaaaaggattaacgaagaaggataagagtattacgtttatcgggagtcattacaaaaatggtcgattagctaatcaggaagcatcatctgccacctttactttacatcagaatggaaccgaccaaacgatgaatgtgctcttgcaattaaagcatgagaaagatacatatgaatcacaatttagtatttggtcagacaaaaagaatgagggaatgacgaaagcgacatcaagcttcccgttcaaagtaagtgactatgttttttctgcacaatctgaaactgtcaaagtctcttctggagggaaggcattgattgcatatacagcagcaatggggaaagacgggaattcacctatgcttgaagagattgagaagaatccaaagcaagcactgaagaataagtcacatgcatacttattttatattcagctagataaataactatcgtaatatatacggagaatatgaagttttttgacgaaaaatctacatattctcttgacgaattgttaagaaagttgtaacataataaaagtcaacgcgatgacgttgcttttgaaaaattgatgcgggtgtagtttagtggtaaaacctcagccttccaagctgatgtcgtgagttcgattctcatcacccgctccaatacataattttgtttataacgcagtatttcgtttcatagataaacgaagtgttgcgttttttattatgtcagtataatgtgaaaagcactgtcaagctacagtgctttttcaataagttcatatttactttctccaccatgtatttgtacaaacatcttcgtcaaggattggattagagcttcactcttttcccgggaaatagatggcggaaagaggatgatttgcagaatgttttttgtgtcttgagaaatttgtgctttacttgcatgagaaaataatcccttaagtcccgcgtcgtcctgccattcaatgtggccagtctcatgttttgctagtgaaagcggctcttctatgcgatcagcatcgaatgtcaggatgggcaagaaatattttaaagagaaaaatatcgacaaatcctgtacggaattggtcgagtcaataaattgttccttttggatatcagcaagaattggcaggaaaggaacgtcttttaaaagatccgtccattctttgattgctggtacttcttctaagactttatcttcgtattcaaagaataaagattcttgaaacaggcgtagtcggccttttaacatttgaggggatgtatcaacttcaatatgcgaatattcaatctgtccaacatggatagacgggttgtcaggatgagaaatttccatatgtatcttcacagtgactcactccaatcggtcatgatacactcgtattatactgaaaacaacagaagaaacaaagaaaggaggtttgcaaggtgattcatgttggagaattaaaagaagaattgattcaatatgcgaaagaaattggtgtcgataaaatccgatttgcaagtgctgatacatttgattcattaaaggaccgcctcatcttacatgaatcgttagggtatttgtcaggctttgaagagcctgacatcgaaaaacgaacaaacccttctttgctgcttccgaaggccaaatcaattgttgcgatagcgctcgcgtatccttccaaaatgaaagatgctcctcgaagtacaaaggatgcaagaagagggatcttttgccgggcttcttggggaacggactatcatgttgtgctgaaaaaaaagctcgatatgctcgaggaattcttgcgaagcaaacatatcgatatacggacaaaatcaatggtggatacaggggaactgtctgatcgtgcagtagcggaacgcgctggcataggttttagtgcaaagaactgtatgattatcacgccggagtttggatcttatgtgtatttggctgaaatgatcacaaatgtcccatttgaaccggatgaaaaaattgaagaccagtgcggaacatgcaataaatgtgtagattcgtgcccaactggtgcacttgtgaatccaggacagctgaattctcaacgatgtatttcatttttaacgcagacaaaaggatttttgcctgacgaatttcgttcgaaaataggaaatcgattgtatgggtgtgatacgtgccaaatcgtctgcccgatcaataaaggaaaagactttcatttgcatcctgaaatggagccggaccctgaaattgcgaagccgctcttaaagccgcttcttacgatcagtaatcgtgagtttaaggaaaaatacggtcatgtttcaggttcatggcgggggaaaaagccgattcagcgaaatgcgattttggcacttgctcactttaaagatacatctgccttaccagtgttgattgatttgatgcacaaggatccacggcctgttattcgaggcactgctgcttgggcaatagggaaaattggcgacgagcagctgctcccagagttggaaaaagctcttgagcgggaaagtgatgaggaagcgaaacaagaaattgtcaaagggattgagtttttacagacacctttaaatactaaataacatccctatgaacatagaatgaaccaaacagagattttaaaaaaagtttggtggtgtctgtgtgaaacaattattagagcaaacattagaagacaggcttggttatttattaaatgggagtgcaattaaacagccgcagctcatgtctgatgtggaagcagttgaacggaaaaaagagctttttgctagaagacaggtggagattgtcaaggcgaaagccaaagcaaaacttcttgattcatcgattcaggatgacggggctcagcatgtgcagtatctcgctcatctcacttatgtatgcaaggatgcagacgactctttttatttagaggagcaggtagaaaaaagagaagcgttcctttacaacgacatgcttgtcaaagatcggatgatgctagaaaaacggcaaatggaagagcaggtggatgagcgctttcagaccgaagaacagtttgggagagcctttcactatgaccggcgggcagctgtgcaatatgcggagacgtactggaataaacgaaatcccgcctataaaaattttgaagataactgcacaaattttatttcacaatgcttgaaagcagggaatgcaccaacgagagggtatccgaaccgcggatctggctggtgggtgcgtcctcatacgtggagctatagctggacggtggctcattcgatgaaaaattatttagcgaattcaaaagcgggtttaagagcaaagaaactcaaagaagcgcaggagcttcaaattggtgatgtcatttgctacgattttgagggagatggcaggtataatcatacaaccattgtcgtcgatcatgataaaggcggaatgcctcttgtgaatgcacagacatatgacagccgtatgcgttattggtcgtatgaggattcgaccgcctatacacctgctattcgttatacgttttttcacattttggacgatgccgcgaaggatagttaatggtataatgttgagcggaaaagaaaattagaggtgaacttttttgggacttcatgtcgttttatatcaaccagagattccagctaatactggaaatattgcgcgtacatgtgcagcaacaaatacaactcttcatctgattcgtccgcttggtttttcgacagatgacaaaatgctgaagcgtgcaggactcgattattggaaatatgccaatgtggtctatcatgactcgcttgatgaattgtttgaggctcatccgaagggacaattcttctatatcacaaaatttggccaaaagccgcatacgacatttgattactctcagttagatgaagactacttcttcgtttttggcagagagacaagtggattgccgaaagatttgatcgaacagaatatggaccgctgccttcgtttaccgatgacagagcatgttcgttctctgaatctatcgaatacggcagcaattcttgtgtatgaggcacttcgccagcagcaataccgagatctgatttaaggtcataatgaaagccgggatacctatcttggctttttttatatgagataagaaatataaagaaggaaaatacgactttttttatactttttttacatgtaaaaaaataggtagtatgatagattgtaatcgcgttttcaaaaaataatgaatccattaaatgagatgaaaaagctactgatcactagtgccattagctctgctattttaatggggacgattccagtcagtatcccaggtctctctcagacgcaggaaatagaagcagcgcaattatcgaaaggtatcggcgggcgtacttatatcaatagcaatggatcaatattggtcacaaagattcaactccctcccgcaatgagtgtgtcaaatgggacagcttatatttattctggattcacaggtttaaaagaagcagacatcggtcttcaatacagtccaacctataatgtgtggaaacctacgatgaaagtaggaacaaataatcaagagacatatatcgaaggaaaaaatgattttacgtatacaaatggatttaagcctggaagtactgtgcaaatgaccatttataaaaacttgaatggacatacaagagcgacgttctggaggacaaataatgttggttataccgggcgtatcatcacagaaattcaaaactcaaacattggctctgtgactaagtggaaattactgtcgacagtagcagtgactgacgatatctaccggaaagatattcgggcaaacttctctactcgttttactgacatcacattagacagtcgtgccgtcacacctgtgattgatacgcaagactttacgtccattcatgtatcagggaatacagtgaatatgcaggtgctaaaaacaacgaattaaatgaaaaaaggatgttccgctaatggaacatcctttttttcatttaccaggcttgccttcgtagccagctgtgaaaatggatactaaaaacgtaatgatgacgcccatcataatgaccgttctcatataagcttcccccttatccctttgtttctatcgctgcctgtttcatatggtgtgaagttcgccttgaaaagcaagagaagaagatcatttttctcctgtttttcctttattatgaagggtcttgcggatggttgtcaattcagtttgccaattcgtcattttgaagaacgaaagcatgtaataggacgcctccgcatagattgtaaaacagtatctgattacttgcttcaatcttgaaagaggaggttcatatggatattttaaagaaaatcgaacagcacagagaagaagagcagcgtctcaaatgggaaggcacattcagcgattatttagacattataaaggaaaatccacttgtcgctcaatctgctcattctcgcgtttatcatatgattaaagacagcgggattgaagaggagaatggggtcagaacgtacaaattttttgatcaggaactttttgggttagaggaatcattggaaagattagtagaggaatattttcaccctgctgccaagcggctcgatgtgaggaagcgtattttgttattgatgggaccagtaagcggcgggaaatctacgcttgttactaggctgaaaagaggactagaagaatattcactgacagatcatggcgcagtctatgcgatcaaaggctgcccgatgcatgaagacccgcttcatcttattccgcaaaatctgcgggaggatttctatagagaatatggcattcgtgtgcaggggaatttgtcccctctgaatatgatgaggctagaagaggaatatggcggacgaattgaggatgtaagggttgaacggatctttttctcagaggataaacgaactggtattggtacctttagtccatctgatccgaaatctcaggacattgctgatttaacaggaagcatcgatttttcaaccattgctgaatttggatcagagtcagatccaagggcctaccgctttgatggagaactcaataaagcaaaccgagggatgatggagtttcaggagatgttaaagtgtgatgagaaatttctatggcaccttctgtcattaacgcaggaaggaaattttaaagcaggccgttttgccttgattagtgcagatgaattgattgtcgctcatacgaatgaaaccgagtaccggtcgtttatttcaaataaaaagaacgaggccttgcactcaagaattattgtgatgccgattccttataacttgaaggtgacagaggaggaacgcatttatcataaaatgatttcagaaagtgatgtttctgatgtgcatattgccccgcatacgctgaaggtggcagcgatgttctccattttgacaagactcaaagagccgaagcgttctgatattgatttggtgaaaaaaatgcgtctgtatgatggagagagtgtcgaaggcttccaatctgctgatattgatgagatgaaaaaggaatttcatgatgaagggatgagcggaattgatccgcggtatgtgattaaccgaatttcctccactattattcgaaagaatatggaatcgatcaatgcgctggatgtccttcgttcgttaaaagaaggactcgatcagcatccgtctatctccagcgaggaccgggagcgctatttgaattttatttctgttgcgcgaaaagagtacgacgatattgcgaagaaggaagttcaaaaggcatttgtgtattcctatgaggagtctgcgaaaacactgatggataattacttagataatgtcgaggcgtactgtaataaaaacaagctgcgtgatccgttaactggtgaagaaatgaatcctgatgaaaagcttatgcgttcaattgaggagcagatcggtatttctgaaaatgccaaaaaggcattcagagaagaaattctgattcgtatttcggcttatgcgagaaagggcaaacgctttgattataattctcatgagagattgcgagaggcgattcagaagaagctgtttgctgatctaaaagatgtggtgaaaattacgacgtcaacgaagacaccggatgaacagcagctgaagaaggtcaatgaagtagtggctagattgattgatgaacatggctataattcaacaagtgcaaatgaacttttaaaatatgtaggcagtcttctcaatcgttaataaatgaaggaggcattattggcgcacctgcaccggtaatgtcttttttagaaatgatcgtcaacttgggtgacgagcagcataggataaaggaatcggtagttagaagaattgtgcaaacaggtgaggagggggatggatgtcccggcaagaaaaaagtcagtttattgtatctcaggaagactggtccctccatcgaaaaggctatgacgaccagcagcgtcatcagaaaaaagtcaaagaagcgattaaaaataatttgccggatcttgtcacagaagaaagcatcatcatgtctaatggaaaagatgttgtcaaaattccgattcgttcgttagatgaatataaaattcggtataattacgacaaaaataagcatgtgggtcaaggcgatggagacagcgaggttggagatattgtcgcgcgcgatggatcagacagtaagcaagggcaaggaaaggggcagggcgctggagatcaggctggtgaggattattacgaagcagaggtctcattaatcgatcttgaggaagcgctgtttcgggagctaaagctgccaaaccttaaacaaaaggagcttgacgacatcattgtcgagcaaattgagtttaacgatattcgcaaaaccgggttaacaggcaatatccataaaaaacgaacgatgctgtcggcatttaaacgaaatgcgatgacaggcagtccttccttttatccaatctacccagaggatatcaaatataagacgtggaatgaagtgaccaaaccagagtcgaaagccgtcgttttggcgatgatggatacgagcggaagtatggggctttgggaaaaatatatggcgagaagttttttcttttggatgacacgtttcttacggacaaagtatgagacggtcgatattgaatttattgcccaccatacggaggcgaaggttgtagatgaagagcatttcttctcgcggggcgagagcggagggaccatttgctcttctgtctatcgaaaggcactagagctcatagacgaacgatacccgccgtcgcaatataatatttatccttttcatttttctgatggagacaatttgacctcagacaatgcacggtgcgtgaagcttgtttctgaaattatgaaaaaagccaatttattctgttatggtgaagtgaatcaatacaaccggcattctacattaatgtcagcatataagcatatacaggatgagaaatttaagcattatattttgaagcaaaaatcagacgtttttctcgcattaaaaaaattttttcagcaggaagaagttctttcgtaaatagcacatttgaaaaaacctttcagcataagggctgaagggttttttgtatggagaaggaagggatcaccagaaaaaaagtaaaactttctctttgacatttcaattttcatttattaatatttaatcttgttaaatataagtttttcaaaaaagatgccgatcgtcttttcttctttttctactctttgctcatgagtgaacaataagtataaatgggctgcacaccatttttcaggcggagtagatgaaggagaaataacagctttatgagcttgtttcatattctgtcagatgatgggcattctaagtttgctaaagcagatgacactatatttttatacatgaaaggagaaacaaaacatgaacagagggcgtttattgctaacgaacattattggccttattgtgattcttgccattattgccggaggtgcttattactactacgaaagcacaaattttgtcaaaactgacgaggcgaaagtgacaggtgacatgtatcaaatcacagcaccagcagctggacaaatcaaaggctgggatatcaatgaaggtgacgaagtgcaaaaagacagcacagttgcaaaagttgaaggagaaacaaaaacaaacattaaatcagtggctgatggcacattagtcaaaaaagaagtacaaaacaatcaacaagtgcagcctggtacagttcttggtgaaaccattgatttaagcaagctttacatcacagcgaatatcaaagaaacagatattaaaagcattgaaaaaggcgacaaagtcgacatcgtggtagatggtgatcctgatacaacatttgaaggaacagttgaacaaattggttatgcgacaaactcaacattcaatatgctgccagcaacaaattcaagtggtaactatacaaaagtcacacaaaaagtagcagtgaaaatttcaattaaaaatccatcagacaaagtacttcctggtatgaatgcttctgtcaaaatttcatcttaatgatgtttgatatcaaaaaatgaaaggaggttgtctgagatggcaaatcaacctgcagcaacaaaacagggagcaggctccttgtctttactgatcattttaatggccggcttgttcgtagcgattttgaaccaaacgcttctgaacgtagccatgccccatttaatgactgaatttaatgtgagtgcaacgacgattcagtggcttacaacaggttatatgcttgtcaacggtgtgctgattccgttatctgcgtttttaatcacacgctttggacagcgcagcttatttctagtcgccatgatctcgtttacactagggacctttatttgcgggattgcgccgaacttttcaacgatgctcatcggtcgtttgattcaggcaatcggcggcggtatcctgcagccgctcgtgatgacaacaatcctttttattttccctccggaaaacagagggaaaggaatggggattttcggtcttgcgatgatgtttgctcctgcggtaggaccaacattatctggttatattattgaacattattcttggcgtattatgttttatggacttgtaccaatcggagcgattgtcattatcgcggctttctttatgtttagaaatattgtagagcctaaaaaaatcaagctggacagccttggtgcgattctttccatccttggttttgcttcgcttctatacggagtgagtgaagcgggaagtgatggctggacagatccgatcgtcttatcgacgattattgttggtgcgattgcgatcattctctttattttccaacagctgaaagctgataatccgatgcttgatttccgcgtgtttaaatacagcatcttctcattatcaagtgtcattaatattattattacagttgccttatacactgggatgttcttacttccgatttatctgcagaacctcgttgggtttacggcattgcaatccgggctattaatgcttccaggggcacttgcgatgctgattatgtccccgatttcagggattttgtttgataaatttggacctcgtccgcttgcgattgtggggatgctcattaccgttgtcaccacattcgagtttacaaggctgaccattgatacatcgtatagtcacattgtgctcatgtatgcagttcgtgcattcggtatgtcactccttatgatgccggtgatgacagctgggatgaaccaattaccacagcacttaaacagccatggtacagcgatgtctaatacattaagacaaattagcggttcgatcggtacgagtttgatcacaacgatttatacgaatcggacaacattccattattccaatatggcggatcaaacaaatacagcggacccgttctttatgaattcattccaggcggctgtgtcgaatgtgatgcatcatatgggcatgacagctgaagctgctcaaaaatatgtatccacccagctctttacgaaagcacaggtcgattcaaacgtaatgggcatcaatgatgcttacatgtgggtaacgttattctgtgccgctggtgtcattctcagcttgttcctgcgtgatgtacgtaaggataaaaagcgaaaagatcagcagcataaaaaacaagaaatgacactgcttccagcacctaaggaagcaaaccaagatgcaagataagtgtggagggaccgtacatgaaaatttatgtcgtatacgatagtgaaggtgaccatacaaaagcactggcagaagcaattgcagcaggcgcaggtgaaacagagcaagctgaagtattcgtcgatcacgtgaaagatgcggatattcgcaagctggatcaaatggatgcgatcatttggggctgccctggtcactttggtaccattagttctgggttaaagacatggattgaccgtcttggctacctatgggcagagggaaaactgatcgataaagtcggtgccgttttctgtacaactgctacaacgcacggcggtttagaaatgacgatgcataatttgattacaccaatgttccatcaagggatggttgtcgttggccttcctggaaatgtgccagagaatgctttatacggctcttactatggagcaggtgtgacatgtccgattgattctgatgaagtgatttctacagaaggcattgaactcggcaaagcattaggaagacgtgtagcatcagtcactgcgtcatttaagcgataaggagagggttcttttggcgacgattattgtagcgttagtagctgctgttctagtcattatcggattagtagcgttcaatgtcagacacgcttcggtcgagaagaaagagatcaaagaagatgtgcccaatcagcctgacgtgccgcacagcgagtcagaagttgcggcgagacctgtagagcctgaagaagaagaggaagcgtcaaagccttctcaaacggatgaacgagtgtctggcgatgatttttatagacaggcgcttcaaaagtttaagcagccagaaccacctgtcaaagaagaagaaccagagacaaaaatgaatgatgatatgtatcgttctgctttacagaagctaaagcagaaggacaaataaaaaagagaacctctcgcaggttctctttttttatggcacaaaaaaaccgccggcagaagccggacggttttccttcactctataaagtgctaaagagcagatgctcttaaattacgctttgttaacgttagcagcttgtggtccacggttaccttcaacgatttcgaaagaaactgcttgaccttcttctaaagttttgaagccttcgccttggatagcagagaagtgaacgaatacatcgtcttgaccttctacttcgatgaatccgaaacctttttcagagttgaaccattttactttaccttctaacatgaaatttcctcctaaagcgatcttaacgcttaaattcactattcttgctcttacacaaacttcaaagacgaaaactctttcaaaactttcttcttaaagatgatacgaacaaaaataattacctttactttaccagtgtttgcgggaaaaaacaactgttatacgaaaacttttttaaaaataattagcgctaacaaattgaggaaaaagcctatattaattggcctctttttctctctgagaagctcacttgatttcggccagactgcttcgctttatagagctcctgatcagccataatcggtaattgtttgatgtctgcacttgttccggggtaataagcacacccaagtgatactgtgatatgaatggacatgccattttgtaaatatatcggctgatctgctatttttctccgtaagcgttctgcaatctgccatgttttttcaactgtacaatttggtagaaggacagcaaattcctcaccgccgatccggccaatataatcagagcttcttgtgtttttcatcaacctttttccgatttcttttaaaaccatatctccctcatgatgtccatattggtcattgatggatttgaagtaatcgatgtctaagtaaataagggacatttgatggataggctgcttaaatttcatagaaaaagcatcacttaagacctcatcgaacttccgtttatttaaaacacctgttaaaaagtcataatgagcttggaatttatacaaatttaacagctgatatgcttttgtttgatgctcaatgacgtaaaagttaaacagtcctgcaacatatgagaacatccaataggcagaatggacttcaatagaggtctcatgtgcaatcgtaataaacaaaaaagttgcaatcacattgctgatcgtaatggacaaaagcattttcgcaacttgattcatatggcgctcagcaattaaaaaagaggctgttgcaatgatcatcatggaaaaaatattgatgaaagaaccgacgttggcatcaattaataatcggccaatgatcacaagacaggctgcaatgatggtttggacgatgcctccataaaaggccgttaaaataagggggatatgtcttaaatcgatgatggctggacctgctttgatagagaagaacattaaaaggacaccgagtaatccagaaagaatgcctttgcatagctgtctgagcagggtatcttctttcttcagaaaattctctttaaacacaagcataaataaataatggaaagtgacaagaattgttaaattaataaagaggtctcttagcaaaataaaatcacctttttaaaattactaaaatttgttgcaaaagaaaaggggaaaaaggataattaataaaaatttcacttatgaggggatcgaaacacatgcgaggaaaacgcttcccagatgaaacggactggctttctttttttgaaacggagcctgatgaaaggttcgagagaggtatgcctattgaatatcaaaacctgacatttcgatttgaaaatcaagacgagcgcttcgttgtcacgatgtaccttggaagtcaagaatttacgttaaaggctgtttgaaaaaaagaggcatctgttttaggcatatatgattttaaaaccgtgcagcatgtagagataaaaaaggacaggccaaacgagaaagagctcttaatcatagtagaagcttatgacgattttatcacaacagttgaaatcacctttttacctttcttctctgtgatggtgaaagaacatttttcaggagaataaacaggagcctctatttatgaaggctcctgttttcttatttgtgctcgatgtcattgattacttgttggattgattcatcatccatcacattcatgacactttcatcaatatggagagactgtgcataagactctcttggctgatggtttcttgatgtcgattggtgctgattcgtatgatttggctgtacagcagtgaatgcctgcttcatcatttgtccgatttccgcagttccctttgattcattctgtgcgtgtgactcgtgacgagatgagtcatggtgctgatggctttttcctttcatcattgaagacatattcatttgcgtcatgcttttcagccttcttcgtaaaaccggagaaaataatgcaatgatggctgttgatactgcaatcattgcgccagtgctcatgccttttcttttcttaaacaaacgaatccctccatttgatcatgatgatacttcttcatcatgtttaggatgaccaaagcaggctgaattatgaattcattttatgaaatagaaatgtgtgcataaaaagccggctggatgaaaaacctatgagcaaaaggagggaataattgatgaataagaaatggatgctatctttactactcgttccaacattgatcaccactggatgtggcatgaacaaccagggagatgagcaaagaggaacaatgaaacgacagtatgaaaatgtcacatataagaatgacaatatgagacaggaagaaccaaatgttcaaacacctcagaaggtcaaagtggcagataaagcgtcagagcttgtagccaacatgtctgaagtgaaaacagcgaacgtgcttgtcacaggaaaaaatgcatttgttgccgttatgcttgaaggcgataaaagcggtaatgtgacggacgatctgaaaaagaaaatttcagacaaagtcaaatcaacggatcaacaaatcgacaacgtgtatgtatctgcgaatccagactttatcgatcgtatggaaggatacggaaaacgtattagaagcggagagccaatttcaggatttttcgatgaatttactgaaacggttcggcgtgtcttccctgaatcaaaatagctacgacaaaagccgtatgtcatatgcggcttttttgtttggaaccgcaccttgcacacctgactgcataaagtaaaaaatatatcacctcttgttgatctttgtttcttcatagaaagagaaagaggctgcaggatgaattcaggtggggagcaaatgaaagccaagccgtcattgattcataaaaagcttgtaggcggaatgattgcagcaggtctcattttttatgctttcaccgcgtacttgatttatgttgcgtttcagctgacaggacaatatttagagcagcagtcttctcctaaaaccatattaacggagggactcaataagcaagtttatgaacatattagaatatactatgcagaggaagaggacgcttttgttgacctgacaatcgaggccatggatcaggcaaagaagaggacagcgtcagtgtttcagtttgaaactgacaaacctttagacattatttattttgatgataaagagacgatcgagcaatttgccggaatcaagcatattacgggtttttactccgatcatgatcaaatgatagggttatatccagataaacgggaagcattattgaagaaagagacactgcctttatactttttcaacacgttatttattcatgaatatgctcactttgttttctatgaaaaagctcattcttatgaagtgtctccagtgatctttccgctttggttccatgaaggaacagcagaatggacggcctatgacgtgttaaatgccacgtctgaacggttcgacgtcattccctttcaatctcttcattccgatcaagattggcaggacgcccggatgacgtatgaaacagatgtttatttgcaaagttattatatgatctatgagctggttcagctttacggacgagatatcatacatgagatcatgcaggaaacggcgaaaacaggtcaatttgctaaaggctttgaacaggcgacaggggagcggctcgcagattttgaagatcagtttaacaagatgtatcaaagaaaaaacggctgaccagagaaaagggtcagccgtttttttaatgaaggggtttttgctgattggctttgcttggcggcatttgaacctgcccttgaagcggtgcgaaagctgatgtcatggccgtcatgtcttgtctggaaagctggggaacttgatagtagccatgcttgttttgatacaagaaaatttcatacgccatttcaataaagttcgggatttgcgcagcaagcacacgtctgacaactggatttgttacttctaatgcagacatggaaagtaatccagcatgtgatttgaccaggctgagcatatgccctgtgatgcccaagtcttttacatcctgtaatgactgattcggcttcttcggctgagaaggcttgatcccgtacgtgacttgtgtgtgctctttcatcatataagtagcggtttcttcactaggcttttggccggtagaaaaacaatctacagtgacattgtactgagataaaacgaattggtattgtcgatccaagatgtcggataatgcaggatcctgaataaactgccgcaggatcatatactgatccaaaatattaatcgtgccggctaaaatttcatgtaaatcgaataactcatgtccgccatgattgagctcgggctggggagcgcttccttgaaacattggttgctgatcgttttgcattgagattcctccttctgtttatacaatctgttttaatgtgaggatgttttccttctttcatgcaaaaacattatttacaattagagggttttcttcctttttgtcgaaaaaaagtatcagacgaatgaacatgggggtaccagatgcaggacaaaatcattaatcgtttgatagaagacgaacatgtgcaggcaccagtgattggcatcggtgtttcgccgtttgaacagcatcatcttgaggctttttttcaatcatttccacatgaattaaatgcctcttttattgttgtgcaaaatcatgtgacggacgattgtataactgatttggaagcacttgttttaccgattggctaccgggcaaaaacgattaaacatggtgagaaagtcatgaagaagacgatttatttttgtccacagcatgcggttgtgacgttaacagaagatcagcggctgcacctatcagagcagctgccggcgtgcatggcttgctctgtggacttgctttttcagtctcttgccagcgttcaaaaggaagaggcttttgcgattttctttcaaaaaggtcattgtgtgggaagtggcttgcttcagttggttgagcaaggcggtacagctttatcgtgcagtgaggtagaaagtggttttgacaccttgtatcaacaaacattcaaagacccttcaacccttgcggcatatatcgccaatatcatcaacgtcccgcatgtcgatgaggcagatcctgttttactgagaattattgaacgtcttgaaatgtataaaggcattgccttttcaacctatcaaaagaaaaggctgctatctgtcattcaaaaacgaatgaggattgcaaaaaaacggatttcattattatcagagtacgactgcttattagaaagagaaccagatgagcttgatcgcctgcacgcacagcttttaagcggcatgacgtctttttttagggatatggaggcttttcgtgtatgtgaacatcagatcattccgtcgatcattgaaaatgcggtgaaaaacgggaaatctcgatgccgtatttggattgcgggatgttcgacaggagaggaggcctattcttttacgatcttatttttagaagaaatgaagcgaagacaagtgaccatcgaacttcaagtatttgcaacagatatcaaccggaaagccattcaaacagctagtaaaggtctttactcagtagagtctatggcaaggatgccggaaaaatggcgggcgcgatatttcgaaaggaaaggtgacgcttttattgtgaagcagtcgcttagaaaacatattgtctttgcacctcacaatttattgatcgattcaccttttatccacctcgattttatcagttgccgaaatgttctgatgtacttccagcctgaagtgcaaaaacgaatattgtcccgattccaatatgctttaaaagatcaagggatgttgatattagggccaaatgaaactgtacccaatatccctcgtttgtttcatttgttcaatgaaaaatggaacatttacacccattcaaacgtttctaaaccacatgtcccttgggcactaaacgctcgtgatatcgagttgaaagcgcgagccgcacaatatatgcaagaagtaagcgaggattatgatgcatgtatgattatcaacgatagtgacgaaatcctggcattatcaaatggtgcgtattcttttttagaccatacagaagagtcagatcaagcatgtgaatatgtaacacctgattatatgaaagagatgttgagtcaaacctttcaaaaggtgtggacagacgagacagaggttgtgtctcaacatgttctcatttcggaaaaaggcagcaagcagtatgcagattttaccgtgaaaagttttgaccgccgttttaagggagtttacgtcattctcattcgaatgaatgagagaggaaaaaatcaaaataacggcaggggcaaaggaatgtcagatcagaattcagtctatcaacagcgtattgtcgatttagaaaatgaactcaatgaagtcaaacaaaaggagcaggaggcaagggctcaattaaaagcgaaacacacgcaattagaggagtttgagaaaaaacacgagcattttattaatatcataaacaacttaagggtgacaagagaaaaactgtacagaccctctgtcaagccggagcttgcgacgttgtttgtggacagggacatgaatattcgctattacactcctacagctgcctctttatttacttcagcgaaaatcaggcatcagcaatcctttcagtcgatggctaaaaagcttacgcaggaaacgctctatcatgatatccaatccgtcatatcggataggcgcgcgatcgaacgtgaaattgaaacgaacgaaggagagcaattcaccgttcacatcacacctatcttcgatcaagagcatgaaggagcggtgatgacttggattaaaatgaccgaagtaacgaaaatcaaacagtcgcttcatctagcggtgacggcgcttgataacagccatattcatattgtagttgcaacggaggaaggggttatccagtgcgtgaatcagcgtttctgtcagtttgtccagcagcatgaatatgacctgatcggcaaagatattttttctgtctaccattcgctatgtcaatgtgatgatttagagaagcaatggaaggtttgtttaaaagagggcagctggacaggtgagctgtactttcaagatttatctgggcgcgaacgatgggagagagtctctttacatcgaatcgatgatcctgacaaaatgcagtcaaccgtgatgcggatttcagaggatatcaccaatcaaaagcagtcagaaaagatgctgatgaaatcagagatgctgtcggcagtagggcagcttgcagcaggtatcgctcatgagatacggaacccgctgacatcgttaaaaggatttttacagctgatgattcaaagtaagaagtatcagaaagattatgcagatgtgatgatgtcagagtttaatcggctcgagtcaattattaatgaattcctcgttctttctagaagcaaatcggtgaaatttgaaccggtacatgtcaatcttctgctcgaagaagtgatcatggttgttgaatcccaggcggtcttaaaaggcgtgtccattcagaaaaatctgtctccgtcgctccctaacattcaaggcattccgaatgaattaaaacaagtcttcctgaacatccttaaaaacggaattgaagcgatggatggtgtgacaggtgtcatcaaggtgacctctctcatgaaagatcatcaaatgatgttgatatttgaagaccaaggaaagggaataccagaggacgaaatagggaagctcggtgaacctttttatactacaaaagaaaaggggacaggccttggtttaatgatgaccattaaaatcattgaaagccatggcggcaccattcgttttgaaagtaaaagctttgagggaacacgtgtgattattacctttccgatgagttaaaaagacaagttttacatgaaatccattcaacatcaatatttactttgtacactatgagagatgaagcgcaaaggggagaggtctaatgaaacgaatgctatctattcgaatgatttgttgtttggttttgatgatctttagtttgcaatccttactgcctggcatgatcacaggaggcgaggtcagtgcatctgaaaagaaggaaatggtgtggaagcaaaaaaagatcgtgcagatcaaaaaagcccgtcatctaataggagagaccgtgacggtgagcggaattgtgacagcagatcaatccgctgtaggcaatgggaaattgtccacatacattcaagacaaatcagctggaatcaatatttattcagcgcagcccaatcacttcccggaactaaaagcaggcatgaaggtgacagtgactggtaagatcacgtcttataaaggaatcattgaaattgtgccagatcaaggccgcctgaagatagatgctgtgaatcaaactttgccaaaggcgaagcgagtgtccgttaaacaactagaaacggatcaagccggtaaacatgaaggaagactagtgaagattaaaggctatgttgaggcaaaaccagcgcagccggctggcggtggatacaatgtggtgatcattgataaaaaataccacagcaccatcctgagagtgatggtcgatacaaatgctattgataaagtaaagacagggaaatggtacgagtttacaggggtgttaagcaggtatgatacgctgcaggtgcttccaagacataaggatgatatcaaactgctgaaacgccagccaaagccgccaaagatgaagaaggaatacaaagcaacagttgaccgtgtggtggatggagatacgattcatctaaagaagcctgttcttggtacaacaaaggtgcgttttgtgaatatggacacgccggaaacgtatcataagccaaaaaatgaattagaccaaaaccaattgcgttttggacagcaggcgactgactatttaaaaacacttctttcaagcggtgaccaagttacattaaagattggtcctgaagcgaaggacagctatggacgtcttttagctcaagtgaagaccaaaaaagggctaaatacaaatctagagcttgtaaaaaaaggatatgcccctacttatttcatctggccagttggagatgaaaaggactatcatacgtttcaaaaagcagtaaaagaagcaaaagaaaaaggactgggcatatggaacgaagcggatcctctgatggaacagccgtttgaatttagagcacgagaacagaaaaaaggactgacacgctatgttggtgactcagctgtgaaaacctacgtgtcccctgacaaatggaaagaaatcaatgtggataaacggatcttttttgcttccaaagaagaagcagagcaggctggctatcagccggcaaaggatgcaagcgaagtaccattaacgattttaagtatgaatgatttacacggtaaaattgatcaagaatacgagctggatctcaaaggtgatggcagtaaaggcatgtacggacgaatggattatgtcgcggcctatatgaagcaaaaacaagcagcacacaaaaatacgattacggtccatgctggagatatgattggcgggagctctcctatatcttctcttctgcaggatgaaccaaccgttgaactcatggagaacattggctttgatgtgggcacggtcggcaaccatgaattcgatgaaggggtcgacgagctattgcgtatcttaaatggcggagaacatcctaaaggcacaaaggggtatgacggacagaacttcccgctcgtttgtgcgaactgtgaatacaaggatacaggtaagccacttttaccggcttatgaaatcatcgatgtcgaaggaatcccagtcgcatttatcggtgttgtgaccaagtcagccgcaggaatggtcatgccagaagggattaaagacattcagtttacagatgaagtcaaagccgtgaatgaagccgcgaaggaactaaaacaaaaaggggttaaagccattgcagttttagctcatatgacagcctctcaaaatggcgatacgatcactggagagagtgcaaagcttgccaaagaaggtgatgatgaaattgacgtcatctttgcagggcataatcacgaagtggtcaatggagaggtcaatgggaaattaattgtgcaagcctttgaatatgggaaggcgattggcgaagtcaatgtgacacttgaccgcaaaacgaaggatatcgtcaaaaagagtgcaaatatccagtatgtagatcaagctggtatagaaaaggacaaggaagcagcagacatcttggctcattacgggaaagaagtggagccgattattagtgaggttgttggagaagctggggtcaaaatggaaggcggctattcaaatgatggagacacgccgctcggtaatttgattgcagatggtatgagatattcaatgaaaagtgactttgccatgatgaatggagggggcattaggcaaaaccttgaaaaagggccgataacgtggggagatctctttaatattcagccattcggcaacgttttagtcaaactggagatcaagggaaaagacttagttgagatcatagaagctcaaatttctccacaatttggaccagattatagcatttcaggcttttcatattcctatgatccggtaacatataaagtagtcgacttgaagctgccagatggttcagccgtagctttcgatcaaacgtatacactcactgtgaataacttcatggcaactgcaactggcagtaaatatgcaccaataggcagacttgggaaaaaccctgaaacaggcccagaagacttagaagccactgtcgcttttgtcaaaagctttaagggagcttccattgtgtatcaaaaagaggggcgaattcaaaaagcaaaacaagaagaaaaagcagcaagctaaagagcgtatcatctaagagaaatgtaacaggcaaaggagtttaagcatgaaaaagtggcttgcactgactgtgatgacagccgggattgttctgctcggctgggggatttggcaaatcgcctctactcatcttcaaacagcccaatcattagacgaagcgaagaaggctgtggcggacgatcaagggatgtccaaaaagcagtttgctccagaagtggggaaagcctctggcatcctgacgattccaaaattaaaagcagaccttcccattgtcgaagggacggatgcggatgaccttgcaaagggagtaggacactacaaaggcagttattatcctgatcagaatggacaaatcgtcctatctggccaccgtgacacggtgtttcgccggacaggtgaactggatattggagatcagctgaaaatcactgtgccgtatggtgagtttgtgtatgaaatcacgcatacgaaaattgtcgatcagcatgatacatccattattacgttgcagaatgaaaaggaagagctgatattaaccacatgctatccttttcatttcgtcggcaatgcaccagagcggtacattatttatgcaaaaagagcgtctgtctaaagaaaaagagcctgctgatcatatgcaggctcccagcgtgtagacaaacccttgcattcgttgtcagatctacgttccggtgctcgtccttcctagaactgcaaaggttttctatcacgctgaaaagaagaaagggctaaaataagattattttagccctttgtcaacaatctgagatcctgctaatcaaatgcaggctctttattttaatggatgattttattcatgagctggtccatatcaggtggtagaggtgcttcgatgatcagatgctcacctgtaaaggggtgtttcatgtcaacttgcttggcgtgaagagcacacctgttgatgtaatcacgaactccgtcatataaagtgtccccagctagtggatgcccgagactgctaaggtggacacgaatttgatgcgttctacccgtctctaattgcagtttaacggctgtcatttgcagacgtttattcatgtccatgacctgaaaatgagtcacagctttttgtccagtaggggagattcttcgtctgactgcatggtgtttgtcacggccgatcgctgcatcaatggtgcctttcttttttttgaaaagcccctctgcgatggcgatgtatgttcggctgattgtttttttagaaagcatttgatcaagagccgcatgggctaatctatgctttgcaaaaatgacggtgccgcttgtgtcttgatccagcctgtggatatgtctcaccctcttttcttctccatttgcttgaaaatggaaggccacaaggttagccagtgtgcccgtttgtccttgttcattcggatgagttggccgtccggcaggtttttgcacaattaataaatgctcgtcctcgaagagcacctctaattcaccgtattctggtgccacatcactttcttctgtttcaaataaatcaatgatgatctgatcgcctttactgactttagccgcgtgatgggcaggcttttgatttaaacggactttttgatgctccatccaaaaatgaataattggttttgatgcagatacggctgtttttaaaaaatgactgagtgatgtgtgatgatactgctcgtctactttgagtgagagcgtgtgtccttttatgatcatgatatccgttcctctctatgggtatatataggaaacacttaccttggcgaacgcctttttttctgtgctattctgaatggagaaataacgacagagaggtagatgtcacgtgagattaatgaaagctgctacagacctgcaagagcaggcaattgaagaaatatcaaaggaagttgaagatcttctttctcatgctgtcaatggacagcagcgggatatgcgtcaaaaagaccgctcccttacctttattgatggcgtatataacgggacgatggatgatgcttttcgtattttatcgggacttcagctattacataccataattgtaaaaccgaaacgtcatatcaccaaacgtgatcgtgagctattcgagcggaaccgtgagcaggtcaatgcctgcggcttttcttttccgtttgatctagatgattttgtcagccgtcaccttcaaaatgcgtaaaagatggtgtgaacttccttgttaacttacaaggccctcgcacatactatttttaagggaacggagaaacctttaagatctgtaataccaaacccgctctttttcaacattgcctatttctccacgaatcggagcgcttggatctcttacagaatgaacagaacacgggtaggagcctgacaaaacggtgcaggctccttttatacataatcattttagcagacattcatctttgaaagtcaattttattcacgatatgatagcatggagtatatgtttaagacttttgtaaaaaaaaggagtggcctcgttggtaaaggcgattatatttgattttgacggattaattttagatacagaaacacatgaatatgagattttacaagaaatgtttgcggagcatgagtcagatctgcctctttccgtatggggcaaggtcattggcacgcaggcaggctttaagccatttgaatatttggaaaagcagctagggaagacgctggatcatgagacactcacagcagatcggcgttctcgttttcaaaaaagaatgaaggacgaatcagcaagacctggcgtagaagcttatttagaagcagcaaaggagctcgggatcaagattggacttgcttccagctcagactataaatgggtgtcagatcacctaaagcagattggtcttttcgactactttgaatgtatccgcacgtcagatgatgtggaagaagtcaaaccaaatccagagctctatttgcaaaccgcacgctgcttaggggtagagccaaaagattgcgtggcatttgaggattctgtgaatggatcagtagctgccaaacgggcaggtatgaaatgcgtcatcgtcccaaacaaagtgacgagcacgctgcaatttgaagaatatgatgtcagattagaatccatggctgaaatcgaattgctccagctattccatcagcttgaaaaagaggatcagtaagggggcaaaaacatcatggcagaaaaactagacttaacgcggtttgaaaaaagaatggtgatccgtaatatccgtgaagaggatattgaccgaatcattgccttgcaagaggtatgctttccaggcatggacccttggaaacgagagcatcttgaaagccaccttgagcatttcccagaaggacagttttgtgctgaattcgagggagaaatcattggctcttgttcaagtttattaattaactttgatgaatacgatgatcgccacacgtggcaggacattacagatgatgggtacatcacaaaccataatcctgatgggatgaatatgtacggaatcgaagtcatggtgagtcctgagtaccgccgcatgaaaattgggcatcgtttgtatgaagcaagaaaagacttagcgagaagattaaatttaaaaagcatcatcattggcggacgcattccgaattatcataaataccaagaggaaatgacgcctcgccagtatgtggagcaggtgatgcttcaccaaatctatgatcccgttttatcttttcagctgttaaatgaatttagtctcatgcggatcaatccgaattacctgccggatgataaagcatccagcacatatgcgacgttaatggaatggaataatgtcgactatcgcccgcaatcgaaaagatattataaatcggcgttccccgttcgaatttgtgtgattcaatatgcgatgaaacaaattcattcctttgaggaatttatgaatcaggtggagtattatgtggatgtcgcatcagatgcatcagctgactttgccgtattcccagaaatttttacgacgcagctcatgtcttatttagaagagcgttcaccaagtcttgccgtacagcggattacggaatataccgaggactacattaatttgttcacagacctttctgtgaaatataacattaatatcatcggcgggtcccactttgtagaagaggaagggaaaatctacaatatcgcctatttatttagacgtgatggaacgattgaaaagcaatataaacttcacatcacgccgaatgaaagaaaatggtgggggatttcagctggtgaccaggtccgggtatttgatacagactgcggcaaaattgcgatccaaatttgctacgatattgaatttcctgagcttgcacggatcgcggctgacaaaggagcgaaaattattttcactccgttctgtacagaagaccgccaaggctatttaagagtacgttactgtgcacaggcgagagcggtcgaaaaccagatttataccgtcatctcgggaacagttggcaaccttccgcaaaccgaaaatatggatgttcaatatgcacaatcggctatatttgccccatcagactttgaatttgcaagagatgggattgtaggagagtgtaatccaaacattgagatggttgtcgttggtgatgtcgatttagaaattttaagaagacaaaggcaagacgggaccgtacgtcagctgaaagaccgaagaagagacgtgtaccatattgaatataaaaaataatgaaaggaagcgcctattgttgaggcgcttctttttgatgacattttttaaagagacaatgtggcgcaatgagcgatcgctttcactgctaaaaaagggacatctgattggataagattttttcgattgacaaagggatgctggagcaaaagcagaatatactgaaaggagatcatgtgttcaaaaaggagaggaatatggggcgacaatctaaacatctgtatatcaatttgccggtaaagcacgtgaaggaatctatcgctttttttgagcagctgggttttgactttgagcagcagttcacgaatgatcaggcggcctgtttggtcattgatgacacgatcaccgtcatgctgttatctcttaggcattttcaatccatctcagagaaacaattagtggacgcaaaagaggcatcagaggtgattatctctattcgtgtcaattcacgagaagaggtcgatgagcttgtcgagcaggcaatggcagcaggcggttcaccgtttaaggagaagcaggatcatgagttcatgtatggatggagctttcaggatcttgatggtcatttgtgggaagtgttttatatggatgaggaaagaagcggcctttcataagggtgcttcttttttattgtttatcagtggtatgataatgaggaagcagaaggaatctggaattcaactagagaaaagtaggtgcagcatggagtttttacttgtcttactgccagtgttcggcatatttctgattgggtatatcgggcagaaggcgattggttttgacatacatacgctctcatcaatgtctttatatttaatgtcaccatttcttgcgtttgaaaccttttatcaaaacaaagtgtcgatggactatgtgtatttatccatttttgttgtcgggctttgtcttgcacttattttatgtgtctttattttatctcgtatctatgggtattcgaatgaaacgtattgtgccatgattctgtcgtcagcctttatgaacaatggaaactacggcacgcccgttgtgctgcttgtcttcggagcagcaggtttggatattgcgatcgtattgatggtgctgcagcagcttgtcatgagtacaatcggtatgtattatgcagcaaagggcggagaggatgcgggagatggaaaggtcgtgctgaaaaaagtgcttcgtatgccggttgcttacggggcgctcatcggtctattatttcagctgattgacctttcattacctaaagagctgatgacgggtattcagcttgtagggaatgctgccataccgacgattatgcttattttaggtatgcagcttgccgtgatctcttttaagcaagtggattatcgaaatatttcttatgctgtattgctgaagctgtttatctccccactcatcgcatttggctttacggttattttaccggtagatgatatggtgaaacaaattatgatcttagtggcagccatgccgacagcagcaaataccacgctgatggctgtacaatttcgaacgaagcctgagtttgtctcaagcacgacatttctcagtacaatcttaagtatcgtgacattaccagttttattatggattttatccatgcaccctctgggataggggataggcggcaaacaaagggggacatatgaatgaatgtagatgttcatttccaagtgagtgacgtgttgaaaacgaagcattttgcgcatgcaaaagtgttagcaggggaaaaaggattgtttcggcaggtcaaatggatccatgtgttagaagtgcctgatgtagaggatttgttaaatggaggcgagcttatattaacgacagccgcaggcttccatgatcaactggatgtgtttcaagcgtttttacggcagctgattgattcaggggcagccggcttgtgtattgaatttgttccgctaagattcgatgtgccggaagaattgctgacctatgcagaagaaagagattttccgcttattctgtttacaaaagaagtgaagttcgtcaacatcacgcagcatcttcatacaatgatgatcgagcgtcagtatcaaatgatggcagatttagaagcactatcatcaaagctgaatgagcttttactgaccccgcatccgcagatggatattttggatcaagtgtatcagcacgtaagggggattcttttactcctccctgttcagggcgagccgattattttatgtgattcttccaaaccaaccgaagaactggtcatgaattatttgcagtttgcttccgtgccaaaaggatacgaagtgacgcaaaaacaagtgcttgcactcaaacaaacatttgcagatcttgtgctcattcatcaagcggacacgctctctgaatttgaactgctcgtgatggataaaggagcgaatgctcttgcccagcaaacattaagagagctttatacagaagagctgaagaaaacaaaagagaatgaatggctgcaaaaatggttccaagaagagcatacagaacgagagatcatagagcaccttgaagaaacagaagggttgaaaaagccaactggctgcgtagttttgctctttcaaaagcatcatcaaatcgaagaaatcgcagggaatctttactttcttgtatcttgccgctccatttttcagcgtgcgggtttctatctgattgcatatgagcatcaaggacaaaccttgtttattttattaaacacgagaaagaaagaggactggaaagagcgtgcagaaaaggctgcaaacgacatcaaacaattgtatgaccgggagcagccccgaggggccgagatcaattttggtatcggtcaatattgtgaacagtttcagcacatgagaaaaagctttcaagcagccaaagaagtgctgcatttaaaaaaagtgatgcctcagcgggtggaaagtccattttaccaagatctacatatgcttcgtctcatgcctatgatgaaggaaagcggtctgcttgaatgcatggtgaaagagtatttagagcccgtgattgtatacgataatcaaaatagcgggagactctatcaaacgctgaatatctttttacagacaaacggttctaaaaaagaaaccgcaagccagctctatattgttaggcaaaccctttatcatagactggataaactgcatgccttacttggtgaggatatgatgcaagcgccgaaacgccaggcacttgaatttgcaattcttgcttatgaattcctgcaaggaaatcgacgttagcggagtgtgttcaatttgccaaggcatcaagaaaagtgtcttatgatggtgttcaatcagttgacgatctgtctaatgtaatcggcctgcccccttttttataatgaaagaaactgtcaagttccagtttcatatgcctcacgtttcatccatataatgaatggagaggcaatgtgctgcttgaactggtctaagcttctttaatgatgaaaacggatacatgggggcgggaagatgaaaatacatgagcaggcgcaaaatcttcaggcgaaagatgatcagttgatctggcatcatatgaaagggacaaacaaggaaaatgaaagtatggttattcacgaggcagaaggcgcatgggtgacagatattcatggaaatcgctatttagacgggatgtcaggtctttggtgtgtaaatgccggatatggccgcaaagagcttgcagaagcggcgtataagcaattaaagacaatgccttactatccgcttacacaaagccacgtgccggcgattcagctggctgaaaagctaaatgagtggcttggcggggactatgtcatcttcttttctaacagcggttctgaagccaatgaagccgcatttaaaattgtcaaacaatatcatgcgcaaaaaggagagagtacaaggacaaagttcatctcccggtaccggtcgtatcacggcaatacagcagctgctcttgccgcaaccggtcaagcgcagcgtaaatataaatatgaaccattaggtcagggctttatccacgttgcacctcctgatgtgtatcgtcatcctgaggaccaagagaatttggcgagtgctgcggcgattgatcaggctatgacgtgggaactaagcgagaccattgctggggtcattatggagccgatcattacgggcggaggtatcttaatgccgccaaaagggtatttgaagaaggtcaaagacatctgtgaagctcatggggcgcttcttatcgtagatgaagtcatctgcggctttggccggacagggaagcggtttggttttatgcatgaggaagtaaaaccggatattatcaccatggcaaaagggattacaagcggctatttaccgctttctgcaacgtgcgtgaaacgagaaatctatgaagcttatgcaggggaagatacgtatgaccggctgcgccatgtgaatacatttggcggtcaccctgcttcctgtgcggtggcacttgccaacctagagattatggaaaacgagcaattagtggaacggtcagatgcgctggggcgagatatgcttgaacgtttgcaagagttaaaagagcacccatttgtcggagatgtcagaggaaaaggcttgctgtttggcattgagcttgttcaggatcagcagtccaaaaaaccagctgagctacatgttgtcggtcaattgatcgcagaatgtaaaaaacgcgggctgatcatcgggaaaaatggtgatacagttgccggctataataacgttgcccagcttgcaccgccgcttaatatcacagatgatgacgcctcatttatcatcaataccttaaaagaaagcatggcacagctatagcagagagacttctctgcttttttctatggaataaaagcatgctttccagcattttgagctaggtctatgaagatgatgtgaggtgaaatcggtattggacacactaggtgtattgaaaaatagaagagtttctattactgttaggagaagactgatccaatacacttttgaaggagacggcatatgagttttcatgatcaacctattctacctgctgttcgcaatatgaagcaatttgaggaatttttaaaaagtccatttacatatggtgtcttacttgatgttcacttaggccggctaaagggcatcatgaatgaggcaaatgctcatcacaaaaaaatgtttgtccatgtcgatctcattcacgggattaaacatgatgagtatggaacggaatttatttgtcaggaaatgaagcctgcaggaattatttctactaggtcttctgtcatagtaaaagctaagcaaaaaaaggtatatgccattcagcgaatgtttttacttgatacgagtgccatggaaaaaagcatggagttcgtcgggaaacatcgtccagattttattgaagtgttgccgggagtcgtaccagatttaattacagaagtgcgcgagcgagctgggatcccaatatttgcaggcggatttatccgtacaaaagaagatgtagaaagagcgcttgaagcaggggctacagctgtgacgacctcgaataccaccctttggaaagcgttccaaaagtgaaaaagataaaatgtgaatatttattgacaacgttttcatcctctgatactattgcactaagttaatatcatgtgatggagaaacggagatccacaacagcgctttactaggtgacaaatgaccctgatgtaaagtatgtttgttgtggatctttttctttatcttttctacacattcataggggatggcaactgaaccagaggaggaatttttcatgacaccattttggggagaagtcgtaggtacaatgctgctcatcatttttggaggcggtgtgtgtgcggcagttaatttaaagaaatcgctcgcatatcaatccggatggattgtaatcgctttcggatggggatttgcagtggccattgcagcttatgcaacgggtggaatcagtggagcgcatttaaatcccgcactaacaattgggcttgcgctagaaggaagttttccttgggctgatgttccaatgtatattattggtcaaatgcttggcgcattaataggggctattatcgtctttttacattacttaccgcactggaaagcaactgatgatccaggtgcaaagctaggtgtattctcaactggtcctgcgattccgcatacttttgcaaacgtacttagtgaagtcatcggtacatttgtattggttctaggaatcttagcgattggtgcaaataaatttgcagacggagtcaatccgctgattgttggtttcttaattgttgcaattggtctttctttaggtggaacaactggttatgcaattaaccctgcacgtgatttaggtccgagaattgcacatgcgatcctgccgattccagggaaaggcccatcgaattggaaatatgcttgggtgccagttattggtccaattttaggcggcgcatttggcggtgttttctacaatgcagcctttaaagcgaacgtcactccagccttttggattgtaagcgttattttagttgtggtattgttaggactctatgtctctacgaaaaaccaaacaaatgctgtaaatgaaagtatgtaaggggaggaaaacatcatgacaaaagaaaaatatattcttgcattagatcaagggaccacaagctcaagagcaatcttatttgatcaagaaggcaaaattgcacatacagctcagaaggaatttaatcaatattttccgaacccaggctgggtagaacacaatgcaaatgaaatttggagctctgttctatcggtcatttcaacagctttaattgaatcaggaattgaagcagaccaaatcgctggtatcggaattacgaaccagcgtgagacagctgttgtttgggataaacatacaggcgcacctatttacaatgcaattgtttggcagtcaagacaaacgtctggcatttgtgaagatttaaaagcgcaaggacacaatgaaacgtttagaaataaaacaggtcttctcatcgatgcttatttctcaggtacaaaggtcaaatggattttagacaatgtagaaggtgcccgtgagaaagcagaaaatggcgacttactgtttggcacaatcgatacttggcttatttggaagatgacaggcggtaaatcacacgtcacagattattccaatgcgtcaagaacgttaatgttcaacatttacgatctgaaatgggatgaagaattacttgatatccttggcgtacctgcatctatgcttccggaggtgaaaccatcttcacacatttatggtgaaacaacagactatcacttcttcggcagaaatattccgattgcaggagcggcgggagatcagcaggctgctttattcggtcaggcttgctttgaagaaggaatggcgaagaacacatatggtacaggatgtttcatgttgatgaatacaggggaaaaagccattaagtcggatcatggtttattaacgacgattgcatggggcattgacggcaaagttgaatatgctttagaaggaagtattttcgttgctggctcagcgattcagtggctgcgtgacggactgagaatgtttaaagactcgaaagacagcgaagcatatgcagagcgcgttgagtcaacagagggcgtatatgtcgttccggcattcgttggtctaggcacaccatactgggatagtgatgtcagaggcgctgttttcgggttaacacgcggtacttctaaagagcactttgtccgagcaacgttagaatcacttgcttatcaaacgaaagatgtgttagatgcgatggaaaaggattcaaacatttcattaaaaacattgcgcgttgatggcggagctgtgaagaatgatttcttaatgggcttccaaagtgatctgttggatgtgcctgtagagcgtccagaaattaatgaaacgacggcactcggtgcggcctatcttgcgggaatagcagttggcttctggaacgaccgttcagacattgcaaaacaatggaaccttgacaagcgctttgaccctaagatggaagaggacagccgtgactcgttatacagcgggtggaaaaaggctgtaaaagcagctcaagctttcaaataaaccaaaagtatggtatacttcaagtaagttaatagaacggttggagaactggagagaccgcaggcaccgaagtgtagaaatacgctttgggtgtttgcggtctctttttctttaccgtacaacatgggaggaacaagagatgactttttctagcttagaaagggaacaaatgctgcaggaaatgacaaaaaaaccatatgatgtgtttatcattggcgggggtattacaggcgctggtacagcacttgatgcggcttcacgcgggatgcgcgttggtcttgcagaaatgcaggatttcgcagcaggtacgtctagccgctcaacgaaactagtgcacggtggacttcgttatttaaaacaattcgaagtgaagatggtcgcagaggtcggtaaagagcgtgccattgtatacgaaaacggtcctcatgtgacaacaccagaatggatgcttcttccgatgcataaaggcgggacattcggtaagttttcaacatccattgggcttagagtgtatgactttttagctggtgtaaagcatagcgaacgcagaagcatgctaagtgcgaaggaaacacttgcaaaagaaccgcttgtgaaaaaggacggcttaaaaggcggcggctactatgttgaataccgtacagatgatgcacgcctgacaatcgaagtcatgaaagaggctgtgaaattcggggcagaagcagtcaactatgcgaaagtaaaagaatttatttatgataaaggcaaagttgtcggtgttgtcattgaagatgtcatgacgcagaaaacctacgatgtgtatgcgaagaaaatcgtcaatgcgacaggtccatgggtcgatcagctaagagacaaggatcactcaaaagaagggaagcacttacagcatacaaaaggtattcacttagtattcgaccaatcagtcttcccattaaaacaagcgatctactttgacacacctgataaacgtatggtctttgcgattccaagagaaggcaaaacgtacgttggaacaacagatacagtgtacaaaaagcagctggaacatccgcgtatgacaaaagcagatcgtgattatgtcatcaaagcgattcaatacatgttccctgatctcaatattacagaaaaagatgttgaatctaactgggctggtcttcgtccactcattcatgaagagggcaaagacccttcagaaatttctcgtaaggatgaagtatggacatcatcttcaggcttaattaccattgctggcggtaaattaacaggctaccgcaaaatggctgagcacattgtgaatctcgtacgtgatggactgaaagaagaaacgggcaaagacttcgggccatgtaaaacaaagcatatgccaatttcaggcggtcatgtaggcgggtctaaaaatatggcatcctttgtccaagcgaaaacagcagaaggagtatctgttggtttaacagaaccgattgctcaaaaactcgctgaaaaatatggctcaaacgtcagcagtctcttcaagcgtgtagagcagcttcaaggtgaagcagacaaacgaaacattccagcgtatgtactggcagagcttgtctatgcaatcgaagaagaattagctgttacccctgttgatttcttcttaagaagaacaggaagcctattatttaatatcaactgggcgaaaaaatatgcacagcctgtcgttgactatatggcagagcgttttggctgggatgaagcagcaaaacagaaacatcaaacagaattagatcaactattccatgaagcagttgtaccacttgatgctgaataaaagaaaagccgatcatgtatcggcttttttatttgttcagcattttcttcatctgccaatgatatagcatgacataaaggatgattccatataaaataacagtagatgtattttattgatgataagagctgggaggacgaccatgagttggaagacgaattatgagcgatggatcaatgagaagcacctggatactgagctaagggaatggctggaggcacatcaagatgatcaattagcacttgaagactgtttctacaaaaaccttgagttcggcactggaggaatgcgcggagagattggtgccggcacgaaccgaatgaatgtgtacacggttcgtaaagcatctgcaggccttgctgcgtatattgcgaaacatggagaggatgcaaaaagaagaggcgtcgccattgcatatgattcacgccataaatcgcctgaatttgcgatggaagcagccaaaactcttgcttcacagggcattcaaacatacgtatttgacgaactgcgtccaacaccagagctctcctttgctgttcgagagctgaatgcatttgctgggattgtcgtgacagcaagtcataatccaccagaatataatggctataaagtatatggagaagacggcggacagctgcctccacttcaagcagatcaagtcattcaagaagtagatgcaaaagaaaatgaactgtcgatttcagttgattcagaagaaacgttaaaacaacaagggctgatcaagatgatcggagaagaaatcgatcatgcgtatattgaaaaattaaaaaccatcagtgtccaccctgagctggcaggtgaggtcgatgtcaaagtcgtttttaccccgcttcatggtacggccaaccagcctgtccgaaaagggcttcaggctttaggctatcagcatgtgaccgttgtgcctgaacaggaaaaaccagatccgcaattttcaacagtgacatcgccaaatccagaggagcatgcagcatttgagtatgccatcaagcttggcgaaaagcagaatgctgatatcctcattgcaacagacccagatgcggataggttaggcattgcggtcagagatcatgatggagagtttaccgtcttaacaggcaaccaaacaggagccctgctgctccattatttattgtctgaaaaacaaaagcttggtcagctgccgcctcgtcccgttgtgatgaaaacgattgtcacaagtgagcttgggcgtgctgttgcttcagcatttggtgcccatacaattgacacgcttactggttttaaatttattggagaaaaaatcaagcaattcgaagagagcggagaatacacgtttcaattcgggtacgaagaaagctatggctatttgatcggtgactttgcccgagataaagatgcggtgcaagcggcgctgttagctgtcgaagtcgctgctttctataaaaaacaaggcaagtccttgtacgacgcgcttgtcgatatgttcaaggagtttggattttaccgggaagggttaaagtcgttaaccttaaaaggaaaagaaggagcagagcaaatttcagcgatccttcatacctttagaacaaatccaccagctgctatcgcgggtcagcgcatcactgtcatcgaggattaccaatcaagtcaaagacacctcgttgccgaaaagaaagaagaaaccattcacctgccagcttcaaacgtgctgaaatatttccttgaggatggctcgtggttctgcttaagaccttccggcactgagcctaaagtgaaattttatattgcagtcaaaggtacatctttaacagatagcgaagaaaagctgaagcatctgtcagaagaagtgatgaaagtcgtttatgagattgtggaagaaacagctaaataaacaaacaaggccatcgtgtgaatgcatgatggctttttctcagtcaaaaggatgagaaaaaatcatccttttagcgaaagaaccggcagaatgctcatgatataatgagcgtaatgaaaagagaaggcagcaaatgccgggggtaaacagtatgggagaatatcaagagaaggttgaaacattaaaaacgttaaaagaaattgctgaaaagctaaatgaaggcacggaaatgaaagatacgcttcatgaagtgctccatatgctgatggatgtcacaggctttcattcagcatggatttattttatagaaaaagacggttcgtacgaattgatggcagaggtctccttacccgaagcgctggcaaagcatcaaaaacagctcatgtgccaaaacgattgctattgcatcaatcgatacacaaaaggttcacttcaatctgccacaaacattatgaattgtaaacgcatcgaaacggcgatgaaaaagcagcttggggatactgaaggaattacgcatcatgcgacggttcccctcaaagcatgtaagcgtacgttcggattattgaatgtggcggcaaaaggaaaagtcacatttacgcaagaagaattgaacttgcttgaaagcattgcgcttcaaattggtaccgccattcaacggatgaagcttgtgcaaaacgaacatcaacatgctcttttggaagaaagaaaccggcttgcacaggacttacatgattccgtcaaccagatgctattttcagtcagtctgactgctaaagctgcccgtcaaatgactaatgatcaaaatctaggggaaatgattgattttattcagcatttgtcacaagatgcactggttgaaatgcggtcactcatttggcagctaaggccaagaggacttgaaaaaggattcactacaggaattcaagagtatgcaaagcttttaggattacgctgtacattatcgttatcaggctgtatggagatggatcattcgcagcatgaaacgttgtttcgggtatgccaagaagcgctgaataattgtcaaaaacatgcgggagtagaggaagtcaaggtccagcttgaacaatcaaaagacacgtttgagatgaaaatcattgaccgcggaaaagggtttcagtatgacgagcaaatgagcctcccttcacttggtctgaaaggcatgtctgaccgtatcaaaagagctggtggaacattttgtatagagtctgagctcggtaaaggaaccaccattcaagtgaaggtgccattttctcaagaaaggaaggagtcgtcatgagagtcgtgattgcagatgatcatcatattgtgagaaaagggcttgtgtttttcttgcagacacagcctgacgtcgaaatcgttggtgaggcttctaatggagaagaagcattagaagttgtcagacaaacgcggcctgacatcgttctaatggatctatcgatgcctgtgatgaatggtattgaagccacgaaacaaatgatgctggaaatgcccgatacccgcattgtgattctgacaagctatgcggataaagattatgttattcccgctattcaagcaggggcaaaagcctatcagctcaaggatgtagcgccagaaaagctccttacgacaatgattgacgtacaaaagggcacctatcaattagatgctcatatcaccaactttcttgtgcagcatttgactgagccaaaagagcaaaaatggaagttaatgaaagagctgaccaatagagagcgagatgtcttattcgaaattgcaaaggggaaaagcaataaagaaattgcctcatcactgtttatttctgaaaagactgtcaaaacacacgtatctcatgtattatcaaaactagagctggcagatcgtacacaagcggctctgtatgcagtggattatcaaaaaaatcagccgaaagagctgctatgacagaagggaatttagtcgttatgctaaaacttttaagcgcacattcaattcaatgaattgaataaaaaagagcacagatgttggtttatttgacgtgcccttttgcgtaaaaagagaagcatgtccagtctaatttctaataatgaaacgataaaaggcttgatgagtatatgctcatcaagtctttttttattttgagggaggtgatgaaccggctgactaaaggtgaatttaaaaaaggagggaacaaagtggagacatatgaattagtgaatggttatcgccatgatgacaaattgaaagaaagctttaatgcgttagcgatcaatacatttgatttggattttagtgactggtataaaagagggtactgggatgaaaaatatattccttattcctttgtccatcacgggaaagtgatctcaaacgcttccgtctacctcatgtccctgatcattgatggccaaacgtatcgagctgttcaaattggcacggtgatgacggatcaagcctaccgccataaaggattagcgacaaagttaatgcagcatattatggatacgtacgaaaatgactatgatatgatttttctttttgccaatgaaactgtactggatttttatccaagattcggctttacccgttaccacgaaagcgaatttagtctaaatatcggcaaaagcgccattcaaatgaaaaaggacatgcgcaaaaagcagctgacgttggaacatgacctgccattacttgaacagttcgcagaaaaacgtcaaacgggatcaatgaaattagatgctgaagaccatggcagcttattgatgttttattttacattcgtttggccggatgccattttctatattgaagcgttggataccattgtcctgatgaatgaagaaaatgaaaccatacatgtctttgatatcatttctctccagccgcaaaatatagaggaagttgttgcacatattgtgaatgaaacgacggaaaaagtgatattctattttacacctgatacgtcaattgacggcttacatgtggttatggcgccaaatgacgaggatgcgctgtttatttatacaaaaaaagaatgggtaaaagaccactttatgcttccaatcactgcgcactgctaagtgtatgtaaaaaggctgataatcagcctttttctttatgtgtacatcggttgtgaataaacttcagatgcagcagcctctgaagcatggtcaatgtactgcaggagcccatataaacatttttcaacatcagcatcgttccggttaaattgatacgcgtgtaagaaatgctcaatacgtttcgagagcaagtcatcttgcgtacgtaccataagaataagtaaattatcccattgcgagcgatgcgtataataaagtgctttatcataatccgccacattcatcaaaccttctcctttcccttgagaagtcctcattagtttgctcggaacatatcgacattttcaggggaaaagttggtgtccgcattaatcatgtaccgggaattttaggctgaataaatgcttcatgtatgaaaaaggatcgaccagcaaaacataaacaaaatatacatgaaagtgagatcaatgatattatgcagccgaaatggtggatgccttttgcagcaggaatggttttgtatggcattttcatgatccatcctgcagcaaatgcagcgatgcagcctgttgaaaattgggaaagacttgcgtacacagcgttgcaagaggaatatgaaggcgccgctttaaacgattatcaatatattgggcgtacacaagtaaatgaagatcagacaaaagatgtgtttcgcgtcaccgtgaaggaaggctcaacgctttttgccgcacatgcagaaatctattttcacccggtgaccggtcatttgattagtattaacgtattccggctataaaaaaagcacctctaataaagaggtgctccagcgtgtagacaaaccctcgcattcggtgtcagtccttgcgtgccggtgctcacgaatgtcaaattcgctccgcaccagtactcgtccttcctagactgcaaaggttttctatcacgctgaaaagaagacaaagggccaaaataaagctcattttagccctttgtcaatctgaagcacctctaataaagaggtgctcattacggatcaattatttcatgcttccttgaaggtatgagcgaatatccacaccaagtgaatcggctaatcgttgtccgtagtcttcgtctgcacgatagaagttgcagatcgcaagtaattttgttttgtcatttacatctttcaggtcagctgttaggtttttgatcaatgcttgcttctcttcttcagagtagcttcgatatttttccccagcttgtttgaaatcgttcggtttttcaattttttgtctcaccatacggtcaccgtgaagaacttgctcactttctttgtagtgaggattttcttttggctgatcatcgtaacggtttggttcatagttaatatgaccgcttggacgagtcgttgtcataaagccatcctgctgattattgtgtactggtgcataaggacagttcaccggaatgcgcatgtagtttgcaccaagacgatgacgctgcgtatcaggatatgagaacagacggccttgaagcagtttatcttctgatgcttcgattcctggaacaagtgcacttggcgtgaaagcagattgctctgtttcagcaaagaagttctcaggattgcggttgagtgtcatgcgtcctactttttgaagcggataatcttcctcgctccatgtctttgttggatcacatggatcatagtcaaggtcatcataatcgctaagcggcatcagctggacatataagtcccatgctgggtaatggccattttcaatgcggtcatataagtctcttgtcgcatgctggaaatcattcgcttggatttctgctgcttcttccatagataaattgcgaataccttctgaaggtctccagtgatatttcacatattttgtttctccatatttgttgacccatctaaatgtatgcacaccagaaccgcgcatttcagcgtaactcgcagggattccttcatcagagaagagccatgtgagcatatgagttgattcaggtgttaaggtcataaaatcccaataacggtcaggatcttggatattggttacaggatctggcttgagagagtgaaccatatcagggaatttcaatgcatcacgtataaagaagatcggcaagttgttaccaactagatcatagttaccttcttctgtgtaaaatttgacagcaaagccgcgcgggtcacgcaatgtttcaggtgaacctttaggatgaataactgttgagaagcgaacaaaaacgtctgtctgttttccttcttcacttaagaagtcagcttttgtatgtttctccatgctattttcaacttcaaacacaccataagcgccggcgcctcttgcatgaacgacacgctctggaatacgttcacgatcgaagtgtgcaagtttttcaatcaaatggtaatcatcaagaaatgtaggtccgcggtgaccagctgttcttgagttttggttatcgccaacaggcacgccttgattcgttgtcaaatttttatgatttgaatttgtcattcttttctcctcctgtaaacaaaaaaatgatttctagtaatctatataccctaattatattaaatcaaacctgatagtcaatatttatttataataattttaaattaattattattacaagaaggtaaagaaaaagacgaaagaaaagaattctttcgcctaaaggaggagctctctaagagcatctttgttttgagttaaatcttttaatgtgtattgatcaagaacgcgtaagtaagcagtaagtgcttcatgaagtacatgctttaatgaacaaatcggagagatgatacagctgtttttctttgaatcaaagcattcaaccatgactaaatcatcctcagtataacggacaacttctccaatattaatgctttctgggcttttcccaagcctaatcccgccatttcttccacggatcgtttccacatacccgcgttttccaagatgataaatcaccttagtcagatgatttttagaaatgccataaacatcggcgatctgctgaatatttgacagttcattgttttctcttgatgctaaataaatgagtactcttaatgagaaatctgtataattcgttagtttcattttgacgacctctaaacctgatagagttttgtatcatcgtaacacattttagacaaaaactgttcgagaaagtgttaaatgtgacaacatttaaaacatgtattataaatattgcttttataagctgtcatccattacgataaagatgtatttaaaatacacctttttgaaagaaggaatgacgatgttatctaaagatcaaatgaatgccattaaacaatcagcccctctattaaaagctgagggaaccaaacttgtgactgttttttatcaaaatatgattcggcagcacccagaactactcaatcaatttaataaaacaaacctcatgaacggaagtcagccagaggcgcttgctgcgacactatatcaagcagcactgcacatcgatcgattagaagaattacttcctgcggtcaaacagattgcccataagcatgtcagtgtgatggtcaaaaaagagcaatatccaatcgtcggatatcacctcattgaagcgatgaaagaagtgtttggtttaacggaaaaagatgacacgcttttagcttggaaggccgcatatgacattattgcaaatatttttatcacgattgaagcagaaatgatggaggagaatgtaaagcaaactggcggatgggcagatgtgaagccgtttgtgattaagaaaaaggtacaggaatctccatcgctgatctccttttacttagtaccagaagatgaatcagagctgccaatgtatgaagcaggccaatatgttacggtacaggcagatatgccgggtgaagcttatatgtgcagcagacaatatagcttatcagatcagcatcatccttcttattaccgcattacagtaaagcgtgatggtcatgtgtctacatttttgcatgatgaaatggaagaaggggacgttcttcaagtgagtatgccgcagggaatgttctgtttgcaagaagacactaaagagcctgtttattttattagtgctggttctggtgtcacaccaatgatcggtttaatgaaaacagcagcgcaaaacagccagccgtttacaatgattcatgcagatcgattagaggatgtaactgcttttgaaaatgaatttgaaagcgttctagctgcagcttctcatggtcgcatcatcttatgtaatgaacaatttgtacagcctggtaagggtgagcttgttgaaaaggcagcttcccgcattgaccgtccattccttcaatcagtgattggagaagggaaaggccaattttatctatgcggttccccggtgtttacacaggagatgattcatatactaaaagagctgggaattccagaacagaatattcatttcgagtcattcggcgggcaatccacgaaagaaatggaagtcgtctaaacgaatggcggaacatcatgtttttttaggtgcgctcatatagtagggataagtccgatgaggagggatggtttccttgagcgtatctgaaaaacgtcttttacaaagagccattgatgaaattacagaaattgcagatggatttggtctagatttttatccgatgaggtatgaaatctgtcccgcggaaattatttatacgttcggtgcatacggaatgccaacacgattcagccactggagctttgggaagcaatttcataaaatgaagcttcattatgatttagggttaagcaaaatttatgagctggtcatcaattcaaatccttgctacgcctttctacttgataacaacacgcttgttcaaaataaattaattgtggctcatgtactggcacactgtgatttcttcaaaaataattgccgtttccaaaacacaaaacgagacatggtagaaagcatgtcagcagcggcagagcggatcaaagaatatgagcatcttcatggaacaaaagaagtggaatcctttttagacgccgtattggctctacaggagcatattgatccgtctcttgttcgttcaaaactaagctggaatatggacgatgaagaagaatgtgaagatgataaaccaaaacgtcagacgccgtatgatgatttgtggggaatggatgagccgaagacgcatgagaaaaagaaaatcgtcaagcaatttccaccaaagccagaaaaagatattttgctctttattgaggcgcactcccgggagctagagccgtggcagcgggacgtcctcaccatgctgagggaggaaatgctctatttttggccgcagctggaaacaaagattatgaatgaaggctgggcatcgtattggcatcagcggattatgcgtgagcttgatttagattcaagtgaatcgattgagtttgccaaattaaatgcaggcgtggtgcagccatctaaaacaggcatcaatccttactatttaggtctgaagatttttgaagatatcgaagagcgctatgacaacccatgtgaagaattaaaaaaagcaggggtgacagaaggatcgggccgcagcaaaatgtttgaagtcagggaaattgaatcagatatttcctttattcgaaattacttaacaaaagaccttgtgatgagagaagatttgtacttgtttcaaaaacaagggagagactataaagtcatcgataaagaatggaaggctgttcgtgatcagctagtcagcatgagggtcaatggcggctttccttatttgaccgtgatggatggcgactatttaaaaaacaatgaactctatattaaacattggtatgaaggcattgaactagatctgaaatacttagaaaaagtactcccttatttgcatcagctatggggaagaagtgtgcatatcgaatcagttcttgaaggaaaagaagtcatgttttcgtatgatggaaaaggggttcataggaaatatctcgcttaaaaaagaccaaaaaaagatgtctcttagcagacatcttttttgcccattttattggtttttcagcagtttgaaaatgtgttttgcttgatcggtgttttccatcagaccttttagcttttggcttgttgggccatatgcaaagaatggaacttcatcacccgtatgacctgatgttgtccaccctgtatgtgatctcatgttgatcacttcttcaatcgcatcatcaattttaacagcatcctttgtttcagaagccttttgaatggaggctatttcttcttttgtaaattcaagatcgatatattgtttcagcgctgattcaacaggcatgccgctgacaattttgtttgcaataaagtcaggcgtctttttcgctgcttttaccggtttgtaatcccagctgctcgagccgtctgctccgaaggaaagtccgccagttgaatgatcggcagtggtgatgactaacgtatttttatccttttttgcaaaacgaatggcttcttcaaatgctttttcaaaatccttcatttcactcattgcactgacaatatcatgatcatgtccagcccagtcaatttggctgccttcaaccataaggaaaaatccttttttgtttttagacagctgtttaatggctgaggacgtcatgtcttgcagggaaggggtctttttatcacgatcaatcgctttatcaagaccaccgtcagcaaaaatgcctagcaccttttgatttttgtttttttgtaaggcatctttattggtgacataatcatatccggcttgcttgaattctttcgtcaaatcacgatccttccggacaaaatcgacaagacctccgccaagcatgacatcgactgtatgctgttttccgattttttcatcgaagaaatcatcagcgatggctgctgtgttttttctcgatacatcgtgagccgcatacgcagcaggagtggcatttgttaattcagaggtcacgacaagacctgtagattttcccttccgttttgcttcttctagaactgtttttaattttttgccgtttttatttacaccgatcgcattgttgtaagtctttttaccagttgccatagctgtaccagctgcggcagaatcggtgatattgcttttagagtcgttagggtatgttttgtgcatgccagtgaggtaagggtcaaacgctgtttgttttgaaaggtctccgttgtgtttaaatgaacggtaagttgaaagataaggagttcccatgccatccccgatcagcacgatcacattttgcacgtcattttttggcttctttttagcctctgctttgtcagcctgtccaaattcaatccctgaaaaaatgccaatcgatagcacagatgctgccgctactgcagcgattttcgttttcgagcttttcaacacactcattcattttgcctcctcattgtttatgtatcgctcttacgtttacaatggtagagcagaattgtggattcccatttacaggatcgtaaagttcactttaaaattgtaaaggtccactttacatagaatggaccaaaaagagaaatgaatgtatcatttatccatgacaagatgcgtttattttgtcatgattgtgtaatgaaaatgaaatataaagaaccctaaaaaaaaataaattttgccgaattaataagcataatgtcgtaggaagtcaagactatttcttctggtatttgatccttataatagtaagtagataaaattcggatcacgatagatacatacaggaggaacaaatgaaaaaacaattgatcacagctgcaagtgcagttctacttgggacgacattatttgccggagctgcctcagcacaatcagtaaaagttcaaaaaggtgactctctttctgttctagcgaaaaaatacaaaacaagtgtgagcaagattaaatcagataataagctgaaatctaacacgatttatgttggacaaactttaaaagtaaatggtacttcctcaaaaaaaactacgaaaacatcaaaaacaacaacaaaagtaaaagcggcgtcagcgacagctactcataaagttgttaaaggtgatacattatctaaaatcggcaaaaagtacggcatgactgtaaaagagctgaaatcgttaaataaactcaaaacaaacctgatcaaaattgggcaaaagctaaaggtcaaaaagacatctaaaaaagtgaagacaacacctgttaaagaaaaaacagtttctgcttcttctttaaacacgtctaagcttgtagcagatgctaaagcgcacaatggcacaccatatagatggggtggaacgacaccaaaaggctttgattgcagcggatttatgtggtatatcattaacaaacaaaaaaagatttcaagacaaacaactgaaggtttctggggatcaatgaaaagcgtatcaacaccaaaggttggcgattttgtgttctttacaacatataaatcgggtccatctcacatgggtgtctacattgggaacaacaagtttattcatgctgcttctgatggtgtgacgatcagtaatatgaattcaagctactggaagccgatttaccttggagcgaaaacatttgtgaactaatttattctaagagactgcttatgaagcagtctttttttatttgcgctgtagacttaccgttgggtatatttaagaaaacaccaaaaagccagtgctgcttggcgttagtcaagtaacactggctattcatctaatgagatttaaaaacctaattgaagatcgacatcgatcgatacgatggtgtagacacaaacaataacaaagatattcagtacgacaccaaggaaccctgggcccgtacggccttttttaatgaacagttcaataatgccaaatggaactgcggccattgcaaaaggaagcatctgaaaagaataaaatgtcacgttgctgataatggcgaggttcagcatgagcagggataatatcgctgtaccgacggaaatccagccaaatacattatgctctttaaaaattcttaccaattccataattccacctcgctcacttttgccgttttaatgcgttttgtcttcacaaatttctcgatttctttcgaaggacctgtgatcacagagccataaatcgtgacaccattttggttgatatagcgtattcggtttgacagatccagttcaggtctgccagagatcgtttttgcccaggttgggtgctgatcgacataagcaagggcatctttaaattgatctacctctgtttttgatgtgtgctgaagctcttttaagaattcagagtctttcccagggaagccgattggccgctgattcccgcttaatgaatcctctgttttaatcgcattccagagcactttcatatcatattttttagcaaaggaataaacgtcctttggtgtataagctttgtcataggatacatacacttcactgactgttccttcaggaagcttgtctaaagtagtgagtgtttgtttttttgatgcatctggctgcgccgaaggatgggtaaagaaatcctccgtatcgcgtgcgctgtcaccataataagagatggtaggctgctttaatttatcgaaaaacatctcgatttgttcactgccaatggcttctgttttattgccaatttgtttttgcagcttcaattcggtgttcatcccaaaaagcttgacttggccttttaaatccttcatatcaatcgccacgtttggtttcgtcaaagcgacggtgacagcggctgtttccatgaagtgattccctttgctctctgctccgcccacaccgtagtatagataacttcctaatgtacaaagtggtaaaataatgagtgtcgatatgacagcaagcacggaaatacgtaaataagactttctttttccgtattgtaagatggctttttgcttttcaggactgatggaaaaatctgtccaatccgagtcgttcagttcctgacttaagcgtttttcgttttcttcaagttcttcttcaaacgccatcatttcttcctcgttcatctcaccattattatattgttcccatcgcttgttaaactcttcattcatcattaacacctctgttgtaaagtgcttttaggcgctgccttgcacgaaataaaacacttttaaaatttgcttcagtaatattcatgaccttggatgcttccttgtagttcagttcttttaaataatacaatgtcaacgcttccttgtagttatctggaagctgctccaaatacatgttgaggacttcttttatttcaacctgttcagcagggctttgtacagacgtttgtaaaaggccgccaattagatcatccgatatggtcacttcttttttatgtttcctgacataatcaataaaagcatttcgtgccacctgaaataaccaaggtttcactttgctatggtcgtaggaatgaatatgtatataagcacgcataaaagtttcctgcaataagtcttctgccaaatgtttgtcttttgtcatggagagcagaaacctgtaaacatcgttcatatacatttgataaatttcatcgatcgtcactgatttttctcccctctatgttatacacgcataagaaaggcataaagttgcacgaaacttctcaataccgtacattactcatctctttcgccgaatcaaaatcatttctccttatcatagcgaaatttacgccatttataaagcattttcaatagaacaaatcaggaaaaaaccttaaaaaacgacaaaattggacacaattcctcttctattctctcctaaaaccatggacctggatacagaaagaacggtgattcttaacgaaaaatgatgtgatggtttggctgtttaatgaaatttttagtaccaggtaataaaaaatttgttataatagaaacaaatccttcattcttcaaacaaaggaagtgcactatgtataaattttcaggctataccatcaaagtattattttctctccgaggcggaatcaaagtatatcaaaaagagaatctgccaacggatcgggggtttgtcattgcatgtacacatgagggttttgtggatgttcttgcattaggcgcagggattcttccgtttgagatccactacatgtcgaaaaaagaattgtttgcaaataaatggatcggtggatttttaaagaagattcatgcctttccagttgatcgagagaatcctgggccaagcagtattaaaacgcccattaaattattaaaagaggggaagatcgttgggatttttccaagcggaacacgtacaacagaggatgtacctttaaaaagaggtgcggtcaccattgcccagctcggtaaagcgccaatcgttccagcagcgtacaaaggaccgtccaatgcgaaaagtcttttcaaaaaggggaaaatgcgcttaattatcggtgaaccgattgagcagtcagaatttgagcatctgccgccaaaagaacggttaggtgccatgacggaagtattaaacacgagaattaaagaacttgaagctcaattaatggaaaaggcataagaaaaacgaccgcttgctttggcaagggtcgtttttttcttaagaagcgccttcttcagcggcttctgctaattgttcatttaactttttgacttcgatatataccacatggtgtccatcgacttcattaatgataaattcatagccttgttcacgaatggtgtcatttttctcaacttcatatttctgtgtaaggaaccatccgccgatcgtatcgacctcttcgttatcaagctgtgtacctaagagcaggttgacttggtcaactagaacctttccatcaaagatgtaatggtcttctccaagtttacgcacttcgttgatttcatcaatatcgaattcatcacgaatttcaccgacgatttcttcaaggatgtcttctacagtcacaagacctgctgtaccgccgtattcatctgataaaatcgccatgtgtacacgttcacgctgcattttgagcaataaatcatgtacaggaactgtttcaatcacatgaataatcgggttgacaaacttttcgattgtatcacttgtagaacactcaccgctaatgcaggcagtgagaacctctttaatgttcagaacaccaatcatgttatctttatcgccatcttcaattggataacgtgtatatttttctaccttggtcaccttcagcatttcctcaatggtaatatcatgagggaagctgacaacttcggtacgaggaatcataatttctttcgccagacggtcatcaaattcaaaaattttatttacatatttgaattcagactggttaatttcgccgcttttatagctctctgataaaataatccgcaattcttcttcagagtgcgccatgtcatgctcagaaacttgctgaagaccgaacgcttttgttaacaaacgagcagatccatttaatacccagataaacgggaacatcactttgtaaaaaatcatgagcggtctagcaaaaagaagagatacttgctccgccttttgaatggcgagtgtttttggtgcaagttctccaaccacaacgtgtaaaaacgtcataatactaaacgcaataataaaagtgacaatagaactagctgattgaggaatggacagctctacaaatagtggagcaagcatgtgcgcaattgtttcttcccctaaccaaccaataccaagggcggtaatggtaataccgagctgacaggccgacagatactcatcaaggtgagtcgtgacatgcttgacagcaactgctgttttattaccttctgcgattaactgatcaattcttgagcttcttaagcgaatgatcgcaaactctgatgctacgaaaaatgcggttaaagctataagcaaagcaactataagtaaattaactatgtccaattaaggccttcgttctgactttgagaacgaaggtaacacctcctgtttagtaaaaattttaacttaacagcagtaaaaatgattggacagccgtcatcttttcaggtgtaagctgctcttttaatttttcacgttgttctggctgaagctgcttacaacgtaccaaaatgcggtccatatgctcgttcatccgatcgatatcagaggttaaatggacaagttcatcaggatcttccttttgagaagggaattgttcatctaatctggatttgatgtcagaaagagccaatctctgctgtttgcaaagaacgattaattgtaatcgttttaaagcatgttcatcgtaataacgataatttgagcaagatctaacaggcgcaagcaaacctagatttgtataataatctacagttcgtttcgtcacctgtgcaatctgtgctagttcaccaatacgatactttttctcagccccatctgaacatctcctcctaaccgtcacgttatagtttatgaaaatagtttaatataattcgagtctgaaatacaagttaattgttcatatttcctgccgatatgaacattagagagggatttctcagtctagattgtcctgtcaaatttaacatggtgatacaggaattttcagattatttatggtaagataaaatgaataccgtttcatatatatgtagagaggcggatttatacgtgaaccggaggtggttaagtggggccctcaatgtagtcttatttaatcagttaaccgttttgcaaaatataacatcatcaatcaggaggtgactccttgttcttctaagaaagagcaaggttaaatggacgatattgttaatctgagtatagttggtgttttgattgctttaacagctttctttgttgcatctgaatttgccatagtaaaggtgagaagttcaagaattaatcagcttgttgccgaagggtccaaaaaggccatcgtggcgaaaaaggtgacatcaaggctagatgaatatttgtcagcctgtcagctcggtattacagtgacatcccttggtttagggtggattggtaagccggctgtaaaagaacttttggttcgaggttttggtttgacaaacattcctgattcagcaatcagcctgatctcagcaacacttgcgttctctattattacctttttgcatgtagtcgtcggtgagcttgcaccaaaaacgcttgcgattcaaaaggcggaaaaaatgacgctctggctgtcaggcccgctgcatgcattttatatcctgatgttccctttcatttatgtgttaaacgggtcagcccgtgttctaaccaaaatgatgggcatcgatatggggtctgaaaaagaacattcccattctgaagaggaattgaagattttattatctgagagcttaaaaaatggggaaatcaacccatcagaatataattatatgaacaagattttcgactttgataatcgaattgccagagagatcatggtaccgcggagagaaatttgtgccattccagaagatatgccgctagatgatatcctctccatcatgacgcaggaaaagtatacacgctttcccgtgttttcaggggataaagaccatgtcatcggcatgctgaacaaaaagcagctctttgcagatcttgtgtatcaaggagaaaaagatcaactgaagattcaagattatatatatccagtgattgaggtcattgacacgattcctattcaggagcttctcgtcaagatgcagcgcgatagaatgcatttggcgattttaaccgacgaatatggcggaacgtctggacttgtcacaacagaagatattttagaagagattgttggagatattcgagatgaattcgatgaagatgagcagccggttattcaaaaaagagccgatcatcattatgttttagatggcaaagtaagattagatgaagttcaagatttgatcgaaatgtcatatcatgatgaagaaattgatacaataggcgggttaatcttaaaagagaatattgatatccgagaaggacaatccatttatcttgatgatattcggatgaaggtcttggagatggatggacgctatgttaaaaagatcgacctgaagaaaggcgtcatatcatcagaaaaaggaaatgcacgcactgggcttgatataaaagagccgctgttagtaaatgaaatgaccttgagcgaaaaataagctcaaggtttttttaggtatttagtctctttttacgaatgtttgttcgagttataataagaacaaatgttcgatagagggggatggacatgctttggtatgaaacagcaagtatcacagagaaaaaaacctcaatgaaacgtattgagtttcatttgaagaatttcaaaaattaccaggcagcgattttaaatatcgaaagacagcttgaaaaaagaagcccgcatcatctggatcacatgacacggaagaagttagaagagcaaaaaaatcagtatgaactcatcgttgcatgtattaaaacagcattaaaagagttggatgaaatagagcagcagctcatcgattacaaatattttcgagattggcggatggccaaatgtgcgatggaaatcggctacagtgaaaaaacactctttttaatgaagcgccagctcatggatcaactgctcatcagcttagccgccattaccaatatttaaaaaaggtgatgtcctatttgatagaacgcagcaaagagacagaaagacccgatgatcgtcatcaataagtagacagcaagttttccgatttgccgctgctctagcatggtcgcagactctacactaaacgtagagaatgttgtaaagccaccgaaaaaacctgttccaatgatcataagcagcggatgattggcagtcacggcacctgtcagtatacctaaaccggcagcacctaataagttgatgagaataatactatacgggaaacgagcatgagacttggttttctgtattaattggctaatgaaaaaacgaagggcgctgccaatcccgccggcaacagctgtatataaaacgatcatttatctgcctcctctctgctgcttattttgatgaaagagccgctgagcaagcatcagtccacataaggcagcggctactccggcaatgactgagagcaggatgtagatcacacttgaggtgaattgcccagtctgtaataaaagaaccgtttctttagaaaaagtggacattgtcgtaaaacctccgcaaaatcctgttccgatcaaagcggcaagatatttttttcccttctggaacataaaatatcctgttgaaaaaccaagaagcagactgcctgttacgttttcgattagcgttgcataagggaatgtttggctgacaatcgattggcttagttcatatctgcaaagtgtcccaagcagtccgcctataaatacagcaagatacgctttcatttacatcatttctcctttagaaaaaatggcgggtgatccgtcaccactccatcaacgggatattttttgatccgatcggctgttttttggtctttcacagtccatataaacacatccatcccgaatgagtggatgcggtctatccaccatctgttgatcatcgttttcttcatattaagacaatcagcaaacaagctgtatgcagttaactttcttttcgccagtttatatgcagtaggctttataatcaaagctgttcgaagagaaggggcgaaagctttgattctttgaagtgcatgatcatcaaaagattgaatcatgatatgacgagaataggcaaaccgattgatgatgtcgacaactgccttttcaattcctatctgccgtcttgggtgtttgatctcgatcaatatcccgatccgctgactgtatctctcaagaacttcttgtaatgttggaattcgttcattcgtgtactgctggtcaaaccagcttcctgcgtccagttttttcagctgatcaagtgtatagcttttgactaaaccgtttccgttcgtcgttcggtcaactgtatcatcatggatcacgactacgtgctgatccaatgtgagctgtacatctaattcaatataatctgcaccctgctgaacagctaaatcaaacgcggcaattgtattttctggggcagcacttgatgaccctctatgcgcgataatatacacatgctccagctccctgacataagttctggtcttatcatatcaaatgctttaccgtttttccttctttactatatggagggaagaagagctgtatgtaatggtgaatcgcattgctaagaaagtatgatgattcaaatgtgaaaagttgcaggaatatcccaagccatgattgagtaaatctgaagtacatcaatttttcttcgatcaattttgtccaaatcgtcagcgttcgccaaaatattagtgctttcgtcatgttgactgaaaattctgatgttttataatgatgaaaaggaggcgagatgattgggtaaagggagaattagagtggaagaacgtattaaggccgaaacggatgctgaaatgtttaaagcgactctccttgatcaggctcagaagaaaaagtagtttgctgcccgtcgatatgtctctagccaaaatttcataattgaacatcatgcctcgggactggtcccgaggctttttatatagaggtcagacatttatgagaggacataaacgaaggttatattataaactagagaggattgttttaaaggagagagacaaacatgattacacaaaaatggatggatacatattttacagtagatgttgcgatccaaatcggtattagcctttgtattttattgctttttttattgcttcggaaagtatttacgaagtacttatttcatcttctctttaggctgaccaatcggtctaaaacggaggtcattaaccaaattgttgtggctttcgaaaagccagccagactgttttttgtcgcacttgggttatattttgcgttaagacaggcaccatactttgagcatcatatggatgtcatcgtcaaattatatagatcctccattatattgatgctgacatgggggctttgtaatttaaccgcagcttcttctttcttatttcaaaaagtaaattcgaaatttgaattggaaatggatgatattttagcaccgtttttatcaaaggtacttcgcttcattatcattgcactaagtattagtgtcattgcacaagaatttaattatgatgtaaatggacttgtggcaggtcttggtctaggtggtctagcctttgcgcttgctgcccaggatacggtggcgaacttttttggagggatcgtcatcattacagagaagccttttacaatgggtgactttgtggagacgccaagtgttcttggaactgtcgaggacattacatttcgaagcacaaagtttagaacacctgctgaagctgttgtgacagttccgaattctacgctttcaaaggaacctatcacgaactggacgagaatgaataaacgccaaattacgttttccgtacgtgtatcctataatacaccaaaggaaaatcttgaccgatgcatcaaacgtctcaaacaaatgctttatgaacatgatggggtgcacaaggagacgatcatggtaaatctcgatgtactggcagacagttatttgaatttatttttcaacttttacacaaacacgacggcctgggctgaaaaccttgatattaaacaggacattaactaccgtatcatggatatcttccatcaagaaggtgtagaatttgccttccctggacagaccatttatatgaaacaaaaaggcgaaaaacagctgggtgaataaaggaggaatggtgagtggatcaaacaaaggtggcagcgctaagcgagaaattaacgcaggcttcacatattatggtactttcaggtgcgggtatgagcacggaatcaggtatccccgattttagatcaacgggtggcttatggactgaagacaccgcccgcatggaggcgatgagccggtcctactttttttcacaccctcagcaattctggccgaaattcaaggaattatttcagatgaaaatgagcggagagtacgagcccaatagtggacatacctttttagccagccttgagaaacaaggaaaacatgtggatattttcacccaaaatattgatggcttgcataaaaaagcaggaagccagcatgtatatgaactccacggctccattcaaacagctacttgcccatcgtgtcatgcgacatatgaactgccttatttattacaagaagaagtgcctgtatgtctaaaggtttcctcagacgggcggacatgtgggcgtgtgctgaaaacagatgttgtcctttttggagacagggtcaaacattttgatcaagtagagaaatcacttcagcgagcggaccttctgctcgtcatggggacttccctagaagtggcgccagcaagatatattccagaagatgccgctcaaaatccttccatcttcaaggtgatgatgaatttgagtgaaacagaatacgatccactgtttgatcttgtctttcatgagcgaattggcgatctcgtgaaagctttataaatcatcaaagaccccgcatccaaaaaaggtgcggggtctttctttattgttgcagcggcttcatcgattcatcaaggacttcaaatgtatagcccttcgcttttagctgtgtgattaaactgtttaagtattttgctgtcgctggctgatcgtgcattaagatgatttttggttcttttggatgttttgtctcaagcacttgcagctgatttaatacctctggtacatattttgagcttttatatttccagtcaagactgtcaattgtccaatcccagtatacaaagcctttttgttttaaacgtgccttttgctgatccgttaaatttggggcgctgccataaggtgttctcacaagatgtgtatactcacctgtgacagaagccaaaatgcgctgatcttccttcatctcattgacgggagaatcacttttttgataaaagcgtttcacatcatgtgtgataccatgaagccctaactgatgaccttcttgatgaagtcttttcacagctgccgggtgttccttaatctgcggcccaagcataaagaatgtggcctttacttgatgcgctttgagcacatctaaaagctgatttgatgtcgctgacggaccatcatcaaaggttaaaaagatcgtttgatccgttacatgtttgtttgggttgatcttaaaatgtgcatctaatgttttcgtagaatcatcttttgctttcagacttgtgcttgtgtttcggaattgactgctcgcagacattttagccggctgatctgctgcctgcatattggttttagatatatcccatataaaaaagaggatcagtgacagaatcactaaaccaatcgcttttgagagcagcatcgtgtttgaaggtgtctgttttttcgtaacccgttgcattactatcgctccaataaatcaaaaatttgtgtcgaatcatgtagtagattctgtcttttttcgctgttttttgtcgtgctcatatggattaagtatacaggaaaaaagagcctatgaatatagaagatgctaaaaaattggaatctttttggttatgagtctatgtttgttacaatagaaagttgaccatttatcatgatgtgaaataattctgaataatcattgaaacgtactcatttatccgctaagatagcatcagactcaaccattaatgcgaagcgaaggggagattccgtatgaaagtattgtataatggcgatttcattgaaaaaaaggatgcacatgttgatattgaagacagaggctatcaatttggtgacggcgtctatgaggtcatccgtgtatacaatgggactttgtttacattaaaagagcatacagagcgtctgttcaagagtgcaaaagaaatcggcattcatcttcaaggggcagtatcagatatggaagaaaagttaaaacagctcgtcgcccacaaccaattaacagatggaggtgtgtatattcaagtcacgcggggcgtcgcacctcgtaaacatcaatatggcgattctctcactcctcaaatcacagcatatacgttccaggtgaaaaagcctgttcatgagcagacagctggggcaaaggccatattatctgaggaccttcgctggttaagatgtgatattaaaagcttaaatctcttatataacgtcatggaaaagcagaaggcatctgaagctggtgcatttgaagccattctcattagagatggttttgtgactgagggaacctcctcgaatgtatatgccgtcattgatggcgtgattcgcacacatccagcaaacaatcttattctaaacggtattacccgtagaaagcttcttgaggtatgtaaagaagagggatgcagtgttgaagaaactcgtataagtaaagaagagctgctgcgcgcgcaggaaatcttcatcagctcgacgacggctgaagtcattccgattgttgaaattgatggccagccagtaggggaaggcgttccaggagagttgacaaagcgtgtacaggaaggcttccagcaaaaaattaaacatgaaagtgaagcatctatttcttcataaataaagagaggctgtaaaccaatgtttacagccttttgtgattcttttattttacaataagcacaggtatatctgattttgatgataacttttcacttacactgccaaagagcatttttttcaatctgctttggtcacgtgctcccatgacgatgaggtctgctgatatgtcttcagcatattcgataatcgcttccgctggttccccctcaacaatttcaatggcagcttcaaactgctcctcatttaaaagcattcttgcttctgcaacgacctcttctgtatgatcttcaaaaatcaagggactttgctgttcatcatgaggtacatacacagggggtgtttgaaggtctgccatgccgccgccgatataagctccgccagtcattgggcgtggtgcatcaaacacctgtctgcttgatttgccatcatgtgcataggcaacagtcagcttggcattcaaggttttggctagagcgattgccttttttaatgctttcttactgtcttcatgtccatcaaacgcaacgaccatccgatcagcttgaaacaatgtcctcattcctttcaaaaggagtctttacactcatggtatacccgttatctgaaaaagatacacatgaaggcggtgaactttttgttagaaaatttcatttattgaaaaatatttattgacaaaatggtgacagccactataagataaaaaaagattcaagagccaaaaggaggaaatgtcatgtgcaacattggaagaatgaaatcaaactgcatgaatgggttgattcacgtgacaattacaccttcattggtcattgaaaagggactcgtatgttccaattgatcggatgaatcaaggcgtatgttgcgtatttgtcaacatgcgcctttttacatgactaaaagaggcgtaccagacagctggttgcctctttttttgttgtattcatttcgcatttcgaaataaagggatggagatcaacaagtaaatgaagaggagtgaaagcatgtgaacatgccaaaagcaagacaaatgacaaaaaccaaaaaaacgaaacaaggtgacagccaggaaaatctagaaagcggctagctttaaaaggagagacaaacatgttttcagtatttgcgaaattaggctggttcttcaaacaagagtggaggcgttatacgatcgccattacgcttctgctcattgtgaatgtgcttgaaatgctgccgccaagatatcttgggcaggcagttgatgacattcgttctggtcaatttacaacatccagtattgtgttttatgtaaccattttttgcttgctaggtgtcgtcgtctatacgctgacatatttttggatgtatcagttatttggcggcgcaaatgtcatggagcgtgtgatgcgcgggaagctcatgcgtcacttacttaagatgacacccaccttttatgaaaagaaaaaaaccggtaatttaatggcattaggtacaaacgatttaaatgctgtggctttaacgacaggttttggcgttctgacattggttgattccactgcttatatgctgatgatcttctttacgatggggctgacgattagctggaaattaaccttaatggcgatcatccctatgccgctgatggcgctcttgattgcgtattatggcagcaagattcatgatcgctttacagttgctcaagatgcatttggtgatatgaacgatcgcgtccttgaatcagtcgcaggtgtccgggttattcggtcttttgtacaggagaaacaagatgtcgaacgctttcgccaaatgacagatgatgtatttcaaaaaaatatgagagtggcgatcattgattcattgtttgagccgacagtgaaattacttgtcggtgtcagctacttaattggaatcggctacggagcctatcttgtgttccaaagtgatttaaccattggtgagcttgtcgcatttaacgtctatcttggaatgatgatctggccaatgtttgcgataggcgaattgattaatattatgcaaaggggaaatgcgtcgttagaccggttgaatcatacactcagctacaagccggatgtcacagacgcctctcagccaaaaacgttacaagagcctggcgatattcagtttgaccgcgtgacattcaggtatccaacttcccctaaagataatttaattgatgtgtcctttacggttcgaaaagggcagacaatcggaattacaggcaaaacaggaagcggtaaaacgactatcgtaaaacagcttctgcgccagtatccaacaggtgatggtcaaatcctgctatcaggagtcccaatccaagagatcgaattggatcagctatttcaatggatcggatacgtaccgcaggatcatatccttttttcaaaaagtgtagaagagaatatgcgctttggtcatcgggacgcaaaacaaaatgaattagcacaagcgatcaaaggtgcttactttgaaaaagatttacgtcttttgccagagggtctcgaaaccatggtgggggaaaaaggtgtggcactgtcaggtggacaaaagcagcgaatttccattgcacgcgctttattaatagaccccgacattttgatactggatgactcgctttctgcggtagatgcaaaaacagaaaccgctattttagaaaatttaaggcaaaatcgtcatgggaaaacgacgtttattacgactcatcgtctatcagctgttgagcatgcggatctcatacttgtcatggaagaaggacgcattgtccaaaagggcacccacgaagagctcattcagcaagatgggtggtacaaagaacaatttctgcgtcagcagctgacaaaccagctggaaggaggggatgaggcatgacaacaggaagaagactccttgcctacgcactcctttataagaaagtactgtctgttgccttgatctttctcatcattgcagtaggtgctgaactgacaggaccatttattgggaagaaaatgattgatgatcatattttaggtgtagaaaaaccatatgtcgaggtcaatgaaaaaacagacaaaaccgtttattaccagggaaataactatatacgaagcgatcgattagacagtgatatgaaatccggaaaacaaatcaatgtggtgcaagtcggattcggttactcttttgtaaatgagccgattcgttttgatggaaaccgaaagatatccggagatcagcttaccattgaaaatgggaacgagcgcgagacatatcaagtacagcgtttatcaaaagaggaaattttctctttttatgagccggaaatcagtggtttggtgcagcttgttctattttatctagggcttctcgtcattgcgattttctttcagtatgcgcagcattatctgctacagcggatagccaatcgaattattcaaaaaatgagggttgatgtatttgagcatattcaaacgctgcctatccggtattttgataatttaccggctggaaaggtcgtagcgaggattaccaatgacacagaaaccattcgtgatttatatgtgacagtcctcgctaatttcgtgacgagtgctatttacatgattggaatttatattgccatgtttttattaaatgtgaagctggcactcatttgtttggtggcggtaccgattattttcctatggtcaatgacctacagaaagtttgcatcagtgtacaaccaccgcattcgttcgatcattagtgacatcaatgccaagctaaatgaagccattcaagggatgaccattattcaagcgtttcgtcatgaaaaagtgacgaaagaggaatttgatgaactgaacaacaatcactttcgatatcagcgaaagatgctgcatttaaattcacttctgtcgcataacttggttaacctgcttcggaatttagcatatgtggcactcatttggtattttggcggtgcgtccttaagtgcgacggacattgtgtcaattggtgtgctctatgcgtttgtcgattatttaaatcgattatttcagccgattacaggcattgtgaaccagttctcgagattggaattagcaagggtttcatcggaaagggttttccgattattggatgagccaggaacaacagtggaagaacctgttcaaaagaaaatggagggacacgttcagttccaagatgtcacctttgcttataatgaaggaaataatgtattaaagaacattacgttcgaggccaaaaaaggccaaacagttgcacttgtggggcataccggttctgggaaaagctcgatcatgaacttgctgctgcgtttttatgacattcagcaaggagacattctcatagatggggaaagcatttatcaccagtcacgccaaacgttgcgtaaacaaatgggcattgtgcttcaagacccgtatttattttccggaacgattgcatccaatgtcagcttaggaaatgaagacattaaaagagaaacgattgaatcatcattaaagcaagtaggcgcagtagagttattgaagcacctgccaaaaggatttgatgaaccagtcgttgaaaagggaagtactctttcctcaggagaacgtcagttaatctcatttgcccgtgcattagcgtacgatccagcgatcttaattttagatgaagccaccgcaaacattgatacagaaacagaagcgatcattcagcgggcgcttgatgtcgtcaaagaaggacgaacgacttttgtcattgctcaccgattatccaccattaagaaagccgatatgattttggtattagaaaaaggtgaaattgtcgagcgaggcagtcatgatcaactcatgcagcaagaagggctgtatgcgcaaatgtacgaactgcaaaagggtgctgttgcaaacagctgatgaataacaaaaaagagcctattcactttgaatgaggctctttttatttgcataaaaagtcgaggattcgtttttgacctcgacctttactagttatatcgtttacacgagctgcatcatcagtaggcaatgccgacgcgttgatgtacaaattccttcgaatttaactgctgatataaaaagtgtgcggtatcttcaactgaaattttctttccatctatagggagaaaatctttctcatagcgatatgaccgtgtcacttctccatctggtaaataggttggacaaataatggtccaatctagatcagtcgattgaaggatttcaaacgctttggcatgctctttagctgctcgggaagtagtccgccttgattcatttgtttcaaaacggtaaagctccggctgctgccttgcctttaaaatacctgccgtaccaattgtaataattcttgaagtatttgattgcttcatggcttgtacgatatgctccattgaaacagataatgtatcatcaccatctgttgatagacagctcacaacaatatctgctcctttgatcgtctcaagcacatcttctcgatttcttgaattgccggtgacttgaaacatacccgcaagcatttcttctcggtttgtccgaatcaatgaacgaactatgtaacgatcatctacttgaacgaaacgaagaaatgcttgtcctacacgtccatgagcaccgaaaagagctattttcatctgttcgatccctccactacatactataagtgaaaagaacccaaaatggtacaacttttatgtgatgctttttttataaaggtgaaaggaccgaatactatgagcatattcacataatagagagatccctacaaattgtagaagttcaaagttcataccggaaataatgtccatgaagatccgctcctttctactacatgatatgagctggaaaggagattggtgagggataaaaataaaaaaagaagacaccttaagaggtgccttctatgatccaaatatgaaattaagcttgtgttccacccatgtgttgttgagcgtaagatacaagacgcttagtgatttctccaccaactgatccgttagcgcgagatgttgtttctgcaccaaggtttacaccgaattcagaagcgatttcgtacttcatttggtcgattgcttgctctgctccaggaactagtaattgatttgaactattagaatttgccatgatgtgaatctcctttttgtatatgatttggtttttggttgggtttgctggaatcgcaccagcgaaatgagcaagtcatttgccacttggcgaaacccaatgcagtaactgctttgtactaagtattatggtgatttctgaaaaaaacatacgagaaaagaacatggtaaatgttgttcaacatgcaaaaaaaccatcactcaatcatgagtgatggtgctgcatagatctctttaatcagcagagcgaatgcgaagttctgtatccgaatcaaagaagtgggccttgttcatatcaatagcaagagggatagactgtccagcctgaacatcagtacgagaatcaacacgtgcaataaaagactgaccatcgagagaagagtaaagcatcgtttctgctcccattaattcagcaacttctacactggcatcgatctttgtgccctcagatgcctctataaacacgggttcatcatgaaaatcttctggtctgataccaaggatgatatcttttccgatataaccttggctgcgtaataccttcatctttccttctggtacacgaatatgcgtttttccaactgcaatagcaccgtcagagagttttcctgtgaaaaaattcatcgcaggagagccaatgaatccgcctacaaatacattctctggattttcatatacatccttcggcgctccaacctgctgaataaagccatctttcatcacaacaaggcgagtagccattgtcatagcttcagtctgatcatgtgtgacatagataaatgtcgtttgcagacgctgatgaagcttagatatttcagcacgcatctgaacgcgaagttttgcatctaaattagaaagcggctcatccaaaagaaagacctttgcatcacgcacaattgctctcccaagtgcaacgcgttgtctttgaccgccagacagagcttttggttttctgtctaaatattgctcaagccccaatattttcgcagcatttcgaacccgctcatcaatttctgatttcgggaacttccgcagctttaatccaaaagccatattatcgtatacattcatgtgagggtacaaagcatagttttggaaaaccattgcgatatcccggtcttttggtgctacatcattcatccgttttccgtctaacagaaaatccccttgtgaaatctcttcaagtcctgcaatcatgcgaagggttgttgattttccgcacccagatggaccaacaaacacaataaattctttatcttctatatgtagattaaagttgtctactgctgttaccttgttatcatacactttataaatttgattgagcatcatttcagccatagatgataacctccccatcctcttattgaaagcgctttacttgtgagtaaagtgtataaaatggggaagcgtctgtaaatggacaacgtgcacaacatctcattttcatttttgggcaggatgctcatgtcattgattgttatgaaagatcgagaagattcatcataaaataaacagcagatgcttctggaaaatgccgtatatcgatccctgttcgctcaataaatttatcgattcgatattgaaggctgtttctgtgaacatataaagcttttgctgccttggaagcatttaagttacattgcatataggtcatgagggtgcggtaaacgtcccgatcaaagaccgcctctttcaaagcatctgaaatagcatgagagagcgcggattcatcataaagtatgagtgatggcagacattcataaaatgtggaaatccctgatctaagcttgcctcgctgcacatggtccaagaaaagctgctgttcatttaacaatttcttctgtaaatgttcatttggcaaatggagctgtccttgtaaaaagactgagtctgttaaaaagtcacttgtaatggctagagacaaatcgtttagcagatctaattgaccattttctgatgtagcgtttgtttgaatcagcatcgctgtatcagcgcctgtccaaatgaaatgagtatgttcgaggctgtgaaccacagcctcttttatttgctgcctttgttctgcttgatgggacattttaaaataatatacacggacggggtgctgaacggttagtggtttgttatcaaaaagatagctgtaccatttttgttcatcctcagtctgctttgtatgagaaagatcaattggtgtaaggaaagtattgagaagaagtgtttctcttgctgtaagctctgatttgtctactccaaataattcgccttcgtctgtttgataccaaagaatttgatgatcatttgtaggtgagctgatgatatgctctccgtaaacaagctttaatttttctaacatggcgaagctccttaaacagtttaatcatagacatggaatagcattaattcgtggatttcttcttttaaggttggttcgacttcatggggcggaagctgagagccccattcaatatcacctgttttgtgatagatgccttcgtagtgcgcaccattgtgaaaaaaggatattttccagcctggcaactgtgctttcttaaagagaggtttccattgaaaatgagaaatcatatcatcattgcctccttgcttttattgatgaaacaataaataaacacgacaatacggaaacaaccttgaacttgattttattgtatctcatctgatgaaaagagcataggaaaagcatagatttcataacaccatcaatttaaaacgaaaaacagttagtagacgttcgtgtggtctgtagttgttgaggtcgtttgtgaaagataagatgcataatccatgatttttttcccaatcagcctttctgagtttcgcaatgaaacatgctggaaaatctcgcggccagggcgagaattggcttcaaacatccagatagctcctgtctgatcaatgcctaaatcaaaaccgatttcaccaatatggccggacattttttcatctatcacctgactaagcgtgatggcagtataagaaagctgctctaaagttttcaaacgcttcttcttttctggaaaaacatcataaagtgtttttactaagccaccatgtaaatggtgagtcgttactgtgtgattgccagagacttttgctgctgctgccgtgactgtccaatggccgtacttatttttattcgtatgaactctgaaatccattggttgattgtctatttgaagaagtgcaatgccttgttgagccataaagtcttgaattgcgtgatctttccggagcttggtcacgaaatgctctattgagtcatatggaacagcgcttccgtgatttgagcatacagtgattccatgagccgtcttctttaattgataaataccgtcgccgtgacttccgttcgatggttttacgtatatgacctgatgtagatggaggagtgtttctattttatttagagcgtccaccggatccaattgtatggaatgtggaagaaaaggacatgttttttcatctgttaacagttgttcatgaatataccatttattgaaaaaataagggttgaaccaaggaatatcatagtcttgtgtgagtttacgctttgtttcttgaatgaatgccgactgagcagcctttctatttggaagacggtcgtaaatgactgacggcaggggcatctgttttttaacccatgtttgctgttggtacaacaatccttctactattcctttatcccaatcaatagaatgtgtaccaaaaaggtaggcaaatccagcatgctgcctgaaagagtgcagcagtttgataaaaaagtctgatctcgttcctagtggctgcgtgctttgcccaaaacctgctgtgaaaatgccaagcagcggccctataaacagtgtatgatcaacggcgatcacatcagcttttgattgataaggaattagtaaatttctatatagattttctgataataaaattttatttggatgttgatgataggaaacggtgaagtcatctactaaacgggatcctaaagcaagagaatagatcgcatcctgctgtttaaaatgggcgggaagatgaactgttttttcacttgtgagatgaggggcgatgaagaagcgatttttgttcataagaaacctccttcggttgagacgtcatcgattgagcatgtgcaagaatggtacgaatcaattgatcttccttgtcaggataagcttttaaaaaagcggatcgccctggctttgatcttatatttgatatgaaaagcctgccttcacttgtatggagtaagtctacagcgaattcaaagcaaggagagaaggttttatctatatatgctgggagagatgcttgaatggatgcaatatcatctaaaagaagctctttgatgtgcggctgcaatgtgtttagatagtgatcaaagcctatcatgggagctgatttttgtgtaatgtttaaatgactattttctgtaggtgattttgtgtgaatccctatgcgattccattgattttgtgaatctttcataaggaaaatccttatttcattgaataaaaagtctttttgatcactcgtctgaaaaaattgaaggaaatatcggcctacgtactttttgcaccagcgctctatatctgatggacgcgaaaatgtgatgacttgctcgggacttagctgaacagtgaaagtgttgtcttttaagaaaatgaagtaagtagatgctgcatgctgttgagagagcggctgcattttacaataaccgtctttccttaccatgttgagaagttctgatggctcttttaataatgagcagacaggtaaatatggctgtaaagaagggaggagacggagctgctcgaatagcatcattttatttgaaatacctgtattcaaaaaatctgttttcggatactttttcagccattccatgattggttttgcttttttagattgtgcgtcatgcttgtaaaggcatcgatcgtaaatcaagtcaggaatctcaaattctgctgcggcaaatccttgaccattcgtataagtttgaccttgtatcaaatttgaagccggctttaaatcaaatggtgtaaaacgaacaacctttaaaccataagaaggggcagctttggctaacccacgagtgaatgcctcttcatactttgaagaaagggtcacaatacctaatgttgatgtcattaaaaaacaccttcttttcaacttctttttttaccagcacaaaaacactttttcatgattttacataaagattgcgctcctttatcattacgacagatcgattgatcatatgtctagcaacatgcttcatttgcttggggacttgacaacaactataatacgtatagattaaaccaataaacttcgggtgttgtttgaaaggtagatgacgactttgaatatattcacaacgtttatctttatgattgttataggcgcagtcataggagcagcgacaaaccatcttgcaattaaaatgctttttcgcccttataagccgtattacttattcgggaaacagcttccttttacaccagggctcattcctaaaagaagagacgaagtagccaagcaggttggtgtcatggttatggagcatttgctcacgccagaaggaattcaaaagcgatttgaatcatcggaggcaaagcaagagatcttgcatacagtccatcgatatattgacaaaggcgctgaaatggagataacagtgctatctttacttgaaagagtcggcgtatcacaggctgacgtcaaagcagatgaatggatccatcagtggtctgatcagaagctcaattcactgcttgaaaaatataatgagcaaactttatctgaattgcttccgctagatgtggaaaacaaaatatcttcaaaaattccagatgcagctgattatattttaaagaggggcattcattattttgaaagcgaggaaggtaaagcaaggcttggtaatatgattgatgatttcttaaaggaacgaggcatgcttggcagtatggttcaaatgtttctagggaattcaagcttaattgatcgggtacatcctgaaatcatcaaatttttaagaaacgcagaaacaaaaagatttttatcagatttgcttgttcaagaatgggacaaggtgaagcagttttctcttcaggagctagatgaaaaatggaatgtgaaggagcttgcttatagtgtgaaaaagcaattgctttcacacttctctacaaagctgatattagacaagccagttggatattatgtcagtgcagtagcgcttgatctcaaaacacactttgcaccagtgcttgtcgacaaggggattaaagcagcatcgaatgctttagagggactgctcgcaaagctcaaatttgaagatatcattcgtgagcagattgaacattttccgcttaaaaaaatggaggagcttgtgattagcatttccaacaatgaacttaaaatgatcacgtttttaggcggttttttaggcggattaatcggcgcaattcaaggaatctttgtcacgctattttaagacaagctagagaaattttgatgaattcattgtatatatgtgaaacgaaagccatagtttgttatagtggagtggtgtccgccgatcatatcggtgataacggatagaaaggagacataacatgtctgtaaatgtttatgatgttgcatatgaccttgaaaaagcactgcgtcatagcgaagaatattcaactttaaaaaatctttatgatgaggtaaacgcggatgagtcctctaaaagaatgttcgagaacttccgggacattcaagtaaaccttcaacaaaaacaaatgactggtcaagagatcacacaagaagaagtggagcaagctcaaaaaacagtggcacttgttcaacagcacgataaaatctctcagttgatggaagcagaacaacgtgtgagtgttctcatcggagaattaaataaagtgatcatgaagcctcttgaagagctttatgggaatccagaagaaaatgaatgaaaagggcgatgatattcgccctttttttatttcacatgttccctgtccaacttttcaaaaaaaggttgtcgaagctcataaattctgcgataatacttatattgaaagtgctttcaaatgagcgctctcatgggacaattgggtgcgtttcacttgggatttacggcgattagccaaacgagagagaagcgcttctgggagaaacgcaaagcataaggggatctgatataagcaatgctttggtgtgtgaaagataaggggatcatggggagcttcatcacctcattgtgacgcatccaaaccatacataaaaaaaagcctaggggtaggctttttttatttacaaaagattcataacacagagctctttcaactgcatgttctaaagcaccaagctagggcatatcctcatcgtaagtacagtcatcaagaagggggatgcctcagtgtcaaaaaaactacttgcactcaatatagatggaacgttacttcgttccaatggaaaaatccattccgctacaaaagaagctgtggaatacgtgaagaaaaaaggggtttacgtgacgcttgtcaccaaccggcattttcgttccgcacaaaaaattgccaaggcgttgaagattccaacttcaacccttgtgacgcatagtggtgcatttatcgcgaataaactcgatgagccgcttcatgtgaagaaattaacggaagaaaaaacatttaatcttgtgcaaattcttgaaagctttgattgtaatgttcgcttactgcatgaaaaattctcaattggcaaccggaaaaaaacgcagtcacagctgatgggaaagacgttgattcatccgtctgatccaattttctatcctgtgcaatttgttgaatcgctaagtgatatgctgatggatgaaccggtcagtacaccagtgattgaagtatattcaaccgcagagcttcagcctgaaattcaccgaaccattcaacaagcttttccatctgtcgatctcattcggatcagtgatgagaaaatgaatattgtatgcaaaggcgtatcgaaagaagcggggctttctcttttgacctcagcattaggtttgactttagaagatactgtggtcattggacaggggacagatgacatcccaatgctcgaattggctggcttaggcgttgcaatgggaaatgcccctcattctgttaagcgtaaagccgattgggtgacacgttcgcaagatgaacagggagtcgcttatatgatcaaagaatactttagaatgcagcaaagagaaggatttttacatcaattcgatattaaacgataatatagacgaaggccctgtcaatcaagaaatggcagggccttcaactgttccagtcattgcttttcctacatagattttgtaaaatgaaacaagtttgaagataaaggtgatatgatgcgaattttaattaaagggctgtcagatgaacgatttcatcgcccgcttgtcaatatagccaatttatttgaagaagatagtgaagtgctgtttgatacaggtgaattggaagatggcttaaccatggtgtttagctggaaagaagaaaatggaacggtggaagcatctggccatatcgctggatcagacatcactagtcgtttttcacgagacgtcccagagggcttgaatgacaaggagcgctggaaacaaatcaaaaacacagtgctgtctgtttatttacatctgcttcaggagcacacaggaatgacgcaaaagtgggggattctcacagggatacgtcctacaaaattactccataagatgctgagagaaggaatgacaaaggaaggtgcgcatgccgcactaaagcgtgattatttgattcatgatgaaaaaatcgatttgatgcaggagattgtcgaccgtcagcttcaagcgattcctgacctgtatgaccttcagcaggaagtaagtatttatattggtattcctttctgcccaacaaaatgcgcttattgcacgttccctgcttatgcgattaaaggacaagctggaagagtgggaacatttttgtttggtctgcattatgagatgcaaaaaatcggtgcttggctaaaagaacatgggatcaaagtgacgaccgtttattttggcggaggtacgccgacgagtatcactgcggaagaaatggatttgctgtatgaagaaatgtatcgctcgttccctgatgtgaaacatatacgggaagtgactgtcgaagcagggcgtcctgatacgatttcgcctgataagctagaagtgctaaaccaatatcatattgaccggattagcatcaatccacaatcgtatgagaatgaaacactgaaagccattggccggcaccatagtgtagaagaaacgattgaaaagtatcacttatcaagacagtatggcatgaataatattaatatggacttaattattggtttgccgggagaagggctaaaggaattccagcattccttgcagcagactgaagaacttaagcctgaatctttaaccgtgcatacgctctcctttaaaagagcttctgagatgacgcgcaataaggacaaatatcaagtagcagaccgagaagaaatcacacgtatgatggatgaagcggtcgcttggacgaaagcacatgactatcatccctattatttatatagacaaaaaaacatcttagggaaccttgaaaatgtcgggtattcattggatgggcaggaaagtttgtataatatcattattatggaagaagtgcagacaattatagggattggatgcggtgctgctagtaaattcattgatccgcgttcaggaaaaattacgcagtacgccaatccaaaagatccaaaatcgtataatgaccgctatgaacactataccgaagagaaaattgaatttcttgagtcattatttgttcctcacgtttaaacactgcggtgatgcagtgtttttttcatttgtaaaagggtatataagtgataaaaagttaaagcaggtgtacatatgattgatgtgatcggaattgggattgggcccgccaatttaggtttggcggctttgttagaggagtatgaagatgtttcatgctgtttttttgaacaggagtccgagtttgcctggcatcctggtatgctgatcaaaggaacggatttacaagtctcctttttagctgatcttgtgacgatggcgaatccaaggagcaggtatacatttttaaattatttacatgaatcaaatagacttcaccggttctatacatttgaacagtttgacattccgcgaagagaattcaatgagtatttatcatgggtcgcaggtgaattagatagctgtcaatttgggatgaaggtagaggaagtgacggactgccaaggtggttatcttgtgaaagtccggcgattgaaggatggatcgctctctgagtatcgggcaaagcatgtcgtgcttggaacagggagcaaaccgatgattcctgtcgatgtgcctgatgctgcactgccatatgtgacacatagcagccgttatttagaccagcaggaagaacttcatgaagctgagtcggtgacggtgattggctctgggcagagtgcagccgaaatcttcttagacctgcttcagcatcaaaagaaaggacagcagctttcgtggtttacgcgatctagtgaatttagagagctggagacggcagagcttggccaggagctatttacaccgaagtacgtcgaatatttccattcgcttccttatgaagaacgaatgaacacattgcctaggctgactggattaagaaatggtatagatgcatcgacgctctcgcgtatttatcaggaattgtatcatcggtctgttacaggtgaagggccatctgtggtgattcagccaatgaccgagcttgaagcgattcaggtggaggagaatcagtccctgaagctgcacctaaagcagtggcagctaaagaaagaaaagagcataacagctgatcgtgccctattggctacagggtacactccgaatatcccggcgtggtttagtgcgtatgaacctttaattgaatgggaaagtgaagagcattttaaagtgacagaagacttcaggcttgtgttcaaagacaagcgtccgcatcatttctttacatttacgaacttagatcactctcatggaacagcggcgaccaatttaaaactatccatctaccgcaatcagaaagtgattcaaaccattcgcggggtcaaagaagcgccagtcaagcaagaaacagcctttcagcaatttgaataagagataaaaagggcccaagtatagggccctttttcattagattgtcgtttcttttttcacttttggtttttctgtttgccatttgaacattttgttcagaatttgataaattcgcttagattccttcgtcacaagcggtcctaaaatcgcaaggattaagacgtacaatgcagcaaatggcttcaaggtagcggcaagtccgcccgcaataccgagctcggctacaatgattgaaaactctcctcgtgatacgatggttaatccaatattagaagaggctttatgagaaaatccagctcttcttccagcgaacattccagcagtgaagttcccaatgaaggtgagaatcacagcgccgatcgcaagccagaaggcatcacctaatgtaaatggatcaatgctgagaccgaagctgaagaagaacatggccccgaagaaatctctaaatggaaccacaagatgttcgatgcggtcagagtgctctgtttctgagaaaacaagaccaagtaagagtgccccaatggcctctgctacatggattgtctctgaaaaaccagcgacaaagaataaagccgcaaaaatcacaatgatgaacacttcgttcgaacggatatcgaacaacttgtttaatcgttttggcagcttacgtgcgatgataaagaaaagcatcatataaccaaaagcaatgaaaatggataataaggcaccgctaaccgttgtggcatctccaaggacaagaccagatacgacggataaataaacagcgaggaaaatatcctcaaacataatgatcccaagaattaactcagtttcagggttcgcagtccgtttcaaatcaacaaggactttggccacaatggcactggatgaaatcgtgataactcctgccataatgagaacctcaaggaacccaaaccctgtgataaaaccgtaaagcagtcctaagctgaagttaatcaaaatataaatagatccgccgacagcaatggatttgcccgatttaataagctttccgacagagaactcaagtccaagatagaaaagaaggaacaagacgcccattctgccaaaaaacgaaataatttcggtgctttcgataaattttagatcaataatcccgatggttggagcatgcggcccaacgatcataccgaggacaatgagaaaagggatgatagagaatttcattttattggcgattaagctggcgatggcgatgagaatcagcgccgtcccaacttcaaagactaaatgatccattcatcactctccccctctagaaagaaaatcacgtatcaatcgctttaagtgttttctttcgcctgaaatgaccatcgtatcatttgcttcaataatcgaatcggcaccagggttcagtaatttttcatttgtatgtttaatgatcgcaatgacggtgacttcatagttttgccgcacatctaaatcaccgagtgtatgtccaaccgcttttgcgcctttttccaccttaaaccattcaatcatcaagtcattgaaggccatttcaatggtttcaagtgcctgcggtttatacaccatgccgccgataatcgcagcgatttgccttgattcagtatcatcgagagaaatggtggacagcacttcatctggatcatcatcgtcaaaacgataaatctcccgtctgccatcatcatgaatcactatcgtcattttttctctatttctcgtttcaatttcaaatttctttccgatcccaggaagatcattttctttaatattcattttatccctccgaatatgataggttgtgtttttcatatagtaatacggatgaaataaaatgaatcagtagaggtaatttgattgacacataatggggatcgcacacttcatttccaaaaaacatagatcaatggataacgcagctgatggagcaggcttgagtagaaaaacctttgaatcagccagtgataatctgttctttaacagaatagagaaggcatgtttttttgaaaatggaggtgtcttcacagcttgaatttcttcatcgtagatggatggagaaataagactaggtgcactcgcttctgcctgtggagcaaaaacgacatttgaaaaaggagaaaacatgacgatgaaactaaccaatatgaatatggaacaccttatcaatcatcctccccctttcaaaatcatttctttcttcatttactatataaaaatatatttcttgtttcaacaattatgcttattttagtatcaattgatcttgaaatttttcatgcagaggaaaaggaattattcgggttgaaatggaattaagtcatgagtttaaaagaaaagggggatggatgatgacatatatcaattgtcagttaaacggggatatttttgaaatcgttttcaacaggcctgatgcttataattcatttcatgtggacatgtttgctgaattcaaagaggcatgtgatgcagcggaagaaagcagtgcaaaagtcgttgtgatcaagggagcggggaaagggttttcagcaggcggagatattggcatgatgcttaagcaggaaagtgaagaagatttccatcgtgtgatggatttgatcgagggaattacactttctctagccggtatgaaaaaagtgacgattgcccttgtccacgggtcagcggcaggccttgcttttagctttgctttaagctgtgactacttgtttatgcatcaggatgcacagctcgccatgaattttaatggagtaggattaattccagatggcggagggcatttttttctcacaaaaagagtcagtgaacaaaccgcgaaacaattgatttggagcggacaaaagctgccggctgaagaagcgttaaaactgcgccttgcagacggggtgtttcaggatgaagtcgatgcgtatcaaaaagtatgtgtgaagccgtttatgaacatgccgcttcaagcatttgtcgaaacaaagctgatctattttcagcagtcagaacctgagctgctagccgttcttcaaaaggagagggcagcacaggcaagactgaggcaaagtcatgatcataaggaaggcattcaggcctttttagaaaaaagacgacctgtgtttcagaacgtataaacgaatgtgagaccggcgaatgccggtttttttaacgttcaaataaaagaagcttgcctgcatcatcaacgagccggtgggaatgcttcgtgtattgctgttcgattaagcgatggcgccctaattcctttgccttttcatcactatccgttgtgattttttcatttaataaggtctcacccgaccggtcaaatacagttaaaaagtatgtcttctccattcctcatctccctttcctctgcttttctatgtaattaaacaatgaataagacaaaacctcttttttaactcttaaaaatgtgttttttagaatgaaagcgatagaacgtgcattcgtaaaaatggcatgataaaatatggacaatgacagtatcggacaaggagatagacgtttgactaagcttacctttattcatgccgcagatttacatttagacagtccatttgcaggaatgtcgaatatccctagcttaccatttaagcggctcaaagaaagtacatttcaaagtgcgaagaatatgtttgatctcgccattgctcgatcagtagactttgtgctgctgagcggagatttatttgacgaatcaaatcgcagtctgaaagcacagctgtttttaagaaatcagtttctaagactgcaaactcaagggattgacgtttttattatttatggtaatcatgatcatttaggcggtgaatggacaccgattgagtggcctgagaatgtgcacgttttttcaagcagtacaccaagtgagcaatcctactatagaggggggcagcttgttgcaagtatttatgggtttagctacaaagagcgggctgtctatgaaaatatgacatctcattatgtcaaaacgacagatgctgcctatcacattgcgatgcttcacggtacattagccggacaagaagggcatgatgcgtatgcaccatttcagcttgagcagcttctttcacgggatttcgattattgggcgcttggacatatacataagagagcccttctgcatgaagacccgttgattatttaccctggtaacatgcagggcagacatataaaagaaacaggagagaaaggctgttacgttattcaactctccgaggattctgagacagcggaatttattagctgtgcggatgtgatgtttgagacacttgcaatagacatgacagaaacggttcatatgacggatcttgtgacacttgtggatagcaaaatcagtgagctgaaagaggagggcgtccctcattttgtgaaaattgaattgacgggtgatgctcctccttactttgagcgtactcagcttgaggttcttgaggagctgttgaccgttcttcatgaacaggaagaagatgaagaggtattcgtttgggtgatatcgattgactgccgaataaacgaggatgtgatctatttagaagattcttttttgaaggaactcactgctgaaatttcacagtttgaggcatatgaagagctgttatcaccgatcaagcgtcacccaacctatagaaaatcaggaaaagctctcacaaaagaggatgaagtggatataaaagaagaagcacaaaggctgctgacagaacagctaaagcaattatgagaaaaggagaggcacaatgaaaatacgttcactccatatcgcccatttcgggaaattttcaaatcggacctttcacttttctgatgacggttttcagctagtttacggcctgaatgaatcggggaaaacgacattgaaaacgtttattgaatcgatgttatttggttttccgaaaaacaagatgtacaagacgaaacagggttctttttatggtggttccctcacttgccaagatgacgagttaggcgttattcatattgaaagaacgtccgatcgaggtggtcaagcacaggtgtttttaccgaatggtgaagtgaaagacgaaatttttctacagacacttttaaagggaacggatcgcaggttatatcaatcaatctattcatttgatgtgtttggactgcaaaatgtccaagccttaaaccaggaccaaataggcgaatttctacttttctcaagtttatttggctcggatgcagccaccaagatggatagcaggctgctaaagcagcaggagcagctgtttaaaccaaatggacgcaagccggaattaaaccagcagcttgatcgtttaaaagagctgacaggtcagctgaaacaagccaaattggtagaaggccgttataccgaaaagaaacgggagcaatctgaattaacggagacgatcgaaatgcttcaaaatgaaatgaagcaagctgaggaacacattcagaaactggctgaatccattcaagtttatcccatgatcgagagaaaagtggaattaaaaaaggaattagcccgctatccagaccgagtcaaacgttttagagcagaaacagagcatgagctggataaactagaatcacaccttcacccgaaaaaggctcaattgactgcactgaagcagaagttagcccatttgcaaacctcacttgtacaagttcaaccgctctatgacaaggataccataatggagatgaaacgagtcgtagatgaagcatctgatgctgagcttgtgaaaaagcgcatagcagagtgtcgagcaaaccgtgattcattgaaacaaaaaatagacgaagcggtagcaaagctaaagtgggagtacccgataaagttcgaacaaatcgacgattcgcttgaatttgagtgggaattaaaggagactgtcactcaatacgttcgtctcatggatagaaaagcgcagttagatgaacgatttgatcacgcaagacatgagctggacgaagcagaagccgctctaaaaggattaaaggaacagcaagtcagacagcacggagcagaagacgatgcgaaggggacaagatcgaaaaagaaaccgattcattcccgggcgttgttattccgaggcttgatcgcatttgatgtggtgcttctgcttgttctattctttttaacagagtggtggatcacgctcttgtttgcgggattttctgtttttctcttctttctcatttacccattcagtcaaatgagcccgatgaaacaaagaagcggcgaaggggcctttgattcatttcaagtgcaggcagcttcagctgaaacacttatgaggcagaaggagcttctgtacgaaagaatcattcggcaatatgaagactgggagctagagctggaacctgtccagcagcaagtagaggaaaagaagagacagcttggcttgtcgtctgagctttctttcctagtagaggccttccatatcctaaaacaattaaaaatgaatacagcagcatatgaggagcttcatcgtgaaataggcgtgctttccgatcagcaatcgatttatgagcgcagggtttcagcgttaagcagtatccttcaaaaaaaggaaggaaccattcaggagaatatctcagcttttcaagagatattgaaagatgaggcgagaagagaaaaagaacgccagacattgcacgtatccattcaacatgcgatccagcaactcacgacactagaaggggaaattcaatattacgaaaaacaaactgacgagctttttcgtcaagtagaagcagagtccaaagaagattaccaagtgctttctcatctatctaaagaataccgggaacggatttcccatttgcagcagctgaatcaagagcttcatagaagcggttgttttgatgaggaggaatggattgttcgcaaaggattacctctccttgaagaggagtgtgcagaagcaaagcagcaccttcatgacgttcaattgaatgcggagaatatggaaaaacgtttagcagaactagcggtggaaatccggcaaatagaagcttctggaacggtgtctgatttgactcatcagcttgccgcagagcaggagcatgcgaagcacctcgcaaaaaaatgggcggcaattcagcttgtccgctccgtcatacgagaaaaattgaatgagcataaagaaacaaggctgcctgcattgcttcaaacagcctcaagttttattcagccgttaacaaatgatcgttatgaagcgattttattttcacctgaagatgacttgctgatggtgaaaagaatggatggacgaatattccgtccagaggagctttcacaggcaacgtgtgaacagatctatctggcgattcgttttgcgctcgctttgtctcatcagcaagattgtcagcttccgtttatgatggatgacagcttcgttcatttcgatcacgttcgtctaggaaaagtgctggagatgatgaacgagctcacacgttttgaaacacagctgttttatttcacctgtcatgagcatatgaagcaagcagcagaagatggacagattacgagtttagcagttgaatgattgacaaataatgacttatgttatacttatatgagcagaaacatggaaggagcttttattgaatggctaaagggatcatgacctatgatgtcggcgaacaagttgacctgcatttattaattaaatcatctactaaagggattgcgagtaatggcaaaccatttttaacgttaattcttcaagatcaaagtggagatattgaggcgaaactatgggatgcaaagcagaatgatgaacaaacctatgccgcgcaaaccattgtgaaggtagtaggcgatattcatcattatcgcgggaggaatcagctgaaacttaggaatatacgccctgttgctgaaaatgagcaaattcgaattgatgattttctcgaaacagctcctattccaaaacatgatatgatggatacgattatgcaatatatctttgatatgaaaaaccctaatatacagcgtgttacaaggcatttgctgaaaaaatatggacaggaattcgctgactatccagcagcgacaaaaaaccatcacgaatttgtctctggtcttgcttatcacgtggtgtccatgctgcatttggctaaatcaattgttgacctatatccatcattagatcgagatcttttatattcaggcatcattcttcatgatttagggaaagtcaaagagctttcgggcccagtctcaaccacctatacggtggaagggaatttaattggtcatatttcgattatggtgacagaaattgcgaaagctgcagaagagcttggcattgattcagaagaaattctgattttacagcacttagtactgagtcatcacggaaaaggagagtggggcagcccgaaaccaccaatggtgaaggaagccgaaatactccactatattgataatttagatgcgaagatgaatatgatggatcgtgcgcttgagcatgtgaagccaggagaatatacagaacgtatttttgcgctagagaatcgttcattttataaaccaacctttcatcacgaataaccatgtcaaaacgtccgtttattgcgggcgtttttttcataacttgtcttcttttcgcataagcatgtaacacaaaggaagagagagctgttctgaaaaaaggaggcgatgaaaaaatgttgttttttccatggtgggtgtatgcatgtatcattggcattattttctgtgcgtataaattaatgacaacggccaaagaggagcaagagattgatcaatcctttattgaaaaggaaggagaaatttttatcgagcgaatggaacaagaaagagagcgtagacgtcaggatcagcaagtgaaaagatcacatgatacggcggcacatgaagactcgattgcttaatcaggtcatataaaaacccctctgcacgatcacggcagaggggttttttgtgattactggttttgttgaggttgttgattttgtgcgggttgttgagacttttctttgaatgtgttttcaagttctttatcttttactttcacatcggcatctttcaccaatttgtttaagatcgtttggatttcatttgtgtctgcttgtttttgattaagcagttcttttttcaagtctgctttcatgtcatcgtatttaccgcgttcttcggtctttttaatgatatggtagccgaattgtgatttcactggtttgctgatttcattcacttttagtttgaaagcagctttactgaagttctcgtccatttggccttcttttgcgaaccagcctacatcgccgccttgtgttgctgaagcggtatcagttgaatattcagacacaacggcatcccatttttcacctttatctaatttcttttccacttcgtcagctgttttcttatcagctactaaaatgtggcttgcgcggattttcccttttaggtcatcgtaatacgcttttacttctttatcagtgattttgatgttagctttggcagccttttgagtcagcagctcatatttcacttgatctttgatgtaatcttttccgaattcatcttgaagttgttttaaacgatcttcaccaagtgtctttttatattcttccattttcttatcaatttctttatcagatactttgtatttgtcagcaagaaccttttgttgaacaagtagatttaaagcatctccacctgcttgtttcttaagagttgtataaagctcttcttttgtgacatctcctgattttgttgttgcgatgacatctttatcaccgctactgcatgcgccaagagttaaaacactaactgctgttacagctgctaaagccatttttttcattcaaaaaacactcctaatctttccaatttatttatcattgcttgtatcataacatattgtgacacgctgtaaaaagaaatgcaaatgggagggcattcgtctagtcaaaaatttgcgcgcgacatacacatatagtgatcacaaaaaggaggctgaattatatgggagcaggatattctaatgggtttgctttattggtcgtgctattcattttgctgatcatcgttggtgcagcatatctttactaattaaatcgctgtgacagaaaggagccgtcctgccatgcgtgcgggcggttcttttttcaaacgatgacaggtgcctaaacgttttcattttttttgcatacactgagcttagaacagagcaagaactggcaggaggtgtttttacatgggaggagaagtctttgctggcggttttgcactagtcgtcgtgttattcatcttattgatcattatcggtgcatcttggatttgctaatcaatcaatatacacaaaaagctgccctcaaactggcagcttttgctttgatcttaaatagaaatggtaatttcaacaaatgatgagatcagtaagatcagtatcgatacattgataaagcgaaacaccttatcttgccgttcttcaggaatctctctgacaaggcataatgtattagtaagcctgtttattgaatacacaataaacgcggcaaagacgatgaagtaaaataaaactatcggagatcccccctctctatgctattcccatactacattaccaaattttttatgaaaaagatagaagttggctttaaaaacctcatgatgaggaagtttggtcaactaaaatatcaaactcgtcttgggcttgatcgatgatgcaggatttaggtgctttgagcagtttccatgcaaataaaaagtcaggcaaacaatagcctgcatgaatacttgcgatgatgataaaatagtgtgcatacattggaaacgccacgcctaacacaaagtaaagcagtgaaatcaaacaaaatggactgagaagtgaataaagcattactttctttggcacacgcttccagcaatttcgtttaaatagcgtcatttttttcttgtttttcatcactgggatcaagtgaaccacacggtggacaagcaatgtcacaagtaaaagcacagcaaaaagcggtgcgttgtggctgcttagtctcgtttcaggatgagtcagttgaaaacataaaaaagccataatgaaaaaaagtatagcaagacttatggctgaaatcagcagtctcgtataaccataatccttttcaagattaatggtcttccaacaattcatttttcatccttccaatcttaaaaaactaattgaatatctcaagataatttactcttcctaaggataaaaatcaatggttttgttgaaaaaaaataaaatgttgccttcatatggaataaagagaggaaactttgggtttttcaagaaaaaaagacagaagagggaggttcgtctctttcgtcaatgagtaatttcggctaaaatagaaagactaagagaaagagggaacgtacatgagtattgaggaacgaatgagccagctcgaatattatatggaacttttgctgacggcgaccgatatgagccgttatccatattatgcattattgatcaggcagcgggtatcgaaagaagaggcgaaggaaattgagcgtatttgtgctgagctttcagaggaaatggacaagcaaaaagcacaaggctacgtcatgtttgacgatatgcttgcgctttttgcaggacagttaattgaaaagctggatgtgcatgagacgatatttgcattgcatgatcaagggctgtttcagccgttaatgaatgaatttataaagatcattaaacaatttgatttgctttagccgctttttctgctgcatcagctgagtcttcaagttcctcaggctttttcgtgacttttcctcgctcattcaaaaagtccttctcaatgtttgaaaacgatttctcaaaaatctccatgaaatcctcaccatagatgtttcggataatacacatcatttctaaaatctcagggaactttccgtaaatgtcatgaagcggctgtgcgcctttgacaataccagttcgtgccgggtcataatcttcaagtagtttatggaatgtctcttcgccttttggcgttagctcaatatacgtattgcgtttatcgtttaactttttagaaaattttaaaaatcctcgttcctccagtttcttggagaagttaaacgccgttgatacatgcatgacgccaaactttgcaatttctgatattgaagctccttttaattgatacgcaatccacaaaatatgatgttcattgatatttaggttatacggtttgatccactgctgccagtccttttcaatggatttccaaagagctttgctcaattgggccattctttgactgaataaaagtgcttcttttacatcgaaaggctgttccgaatgattcatccatttcacctacttctctttttcttgtaattctattatgccaataaaataaagattaataaagctgaaaattcaagaatttttaaaactcatgaaaaacattgacaaaataaccttttttcaacaaaaaaagtgcgggatacgcaccccgcacacttttgtaaacgaatattttttcgtgagtatattagttttgtaaggttttctccagttgtttgagcttttcctcaatttcctgaatttccttttgcaagtcctgctggtgaggtttgatttcttcgcgccattgctgaatcgatgcttgtaattcagttccgacttctttaatgacctctgcgctttcttttgctgtttcaacaatttgctcttttaaagcttgtccatctctttttaatcttgtcagcgtatcttcgaatttgtcatagccgtctttcatctttccgcgcacatctctgccagaagagggagtcgtcaggagcactgccgcacctccgaggagaccgcctacaaataatcctgttaataaagaacgtccactagccattcaaatcacctctagtcaaattttacacattcgcatgttctctctgagctgacgatcagcttcattgaacttccatacatagcttgctttattttagcatacttttgaagaaaagggaggggagaaggttgtctgtctttctgttcgtttttacgtgtatcggtgtcgtttttacaggtggttctattcattatgcaagacagctggggtatgcagggtcttatccgccaaaacatgtattaaagcaaaaagcacttgtgtgtgcggcaggtgcagggatttcgctcctcattttgctgctgaccctttttcttttataaaagcatgaaaaaacctcttcatctattatgaagaggttcgattattcgttaagcaacttctatcattcttgcacgccttagaatggactgagcaattgggaagacaaataccatggcaatggtattaatcacggctgctggaaggacaacgcccacaagaagtgccggtaatgcagctggcagtccagtaatcagtaaagcggcagataggaaaatcacgccggatacgatggttccaatcgcagttaacacagcggtcagcaccactttgttctttatcttcaagcaagataagaaaagggctaggaagataaaggctgtcactggtttatcaatcatatttggaatttgtccgcctgggaaacccgttgttaatgcagaaatgacgccagtcactagggcaataaccactacatgctgtacctttgggaaaaggatgatgcttaaaaacatcatgaccagcatcatatcaggtttcattccgaaaaagatgggcgggaaaatcgtatgcaaaacagctcccattgctgcaagcaatgacataatcactaattcttttgttttcatttctatgctctcctctgctaagctcttaggactcttcaataatatggctcatcatttattgcaagagtcatcactttatatttctcgttattataacaaatttatttctctatagaaaagcttttttactcattttcttgctggaactttttcataaagtccgcaagcttttggcagtcttcaatcgataccgcattgtaaatagatgctctgcatccaccgacagaacggtggccggcaagtccaaccatttgttcctgctttgctttctctacaaaggaagcagtgagcgcatcatcacgaagggtaaacgtgacattcatatgcgaacggctgtcagtgcgtgcgtgtcctttgtaaaaaccgccgctttgatcaattgtgtcgtagagaatgcctgctttttgttcattgcgtttttccgctgcttctacgccgccagcctgtttgacatgctcaaggacaagagacagcatataaatcgcaaaagtcggtggtgtgtgataaagagagttggcttttgcgtgtgttgaatattttaatattttcggtgtgctgcttttctctttctctaataaacgtttgcgcgcgatcacaatcgtgataccagaaggccctaagtttttttgtgccccagcataaatgaaatcaaattgagaaacatcgatttttttgctgagaatatcactggacatatctgcaataagcggtaatgatgtaccagggaacgttttccactgagtgccgaagatcgtattgtttgatgtgatgtgtaagtaagcgccatctgttaaaccggaggcatctacttctggaatatacgagtagttgtcgtcttcacttgaagcaaacacagatgtttcaccaaacccttttgcttctgataatgctttttctgaccaagcgcctgtttgaatgaaatgagccgtttcgccttcatgtaagaagttcataggaatcatcgcaaattgaagactagctccgccctgtaaaaagaggacttcgtaatcttcaggaatgtccatcagttccaccaacagtgcttttgccttattgtggacttcttcatattcaccgctgcgatgagacagctccatcacagacatcccagtttgtttaaaatcaacaagttcttcctgtgctttttgaagcacttctagcggcagtgccgccggaccagcattaaaattcgtcgttcgcttcatcacaatctctccctatttctcgcgttaatggatcaaaagataaaaccatcctatcacaaatttgaagcaattggacgaaaaatttgaatcgttttaaatatcttactattaagagttgaaagcgataaaaaggggcagaaataagaaaaacctcatctattaagatgaggtaagccgcgtgtggatggcagaagaaatatcttttaaatcctctgacgtgtattgctcttgatgtgatttccatacagcaccaaagccatcgccttttccgtagcgcggaatgatatgcatatggtaatggaacacagattgtccggctttttcgccgttgttgtttagaaggtttaacccaattggttcaaattcctgtttgattgctcttgcaattttcggaatcgcttggaagtagtgattagacacttctggtgtcatctcgtagatattttctttatgtattttcgggattacaagggtatgtccttttgttacttggctaatatctagaaaagccaatacatgctcgtcttcatatacttttgcacatggaatgtctccatcaatgatcttgcaaaaaatacaatcgctcacgtcatgtcactcctcattcattttccttcatcgtatcacaaaaagaagcaaaaaagaaaacaggacaagcgaactcctttggtcgctcatcctgctcctgcagaagaaatgctgatgctttcattcgatatgccttttgaattctctatttactgaaataaagaattcgtatgcctgctatttctgccgtaaacacctcatttgacgttttggtttgtcgtatacatattgtataggacacaaaaatcaagaatcagtgaagcaaaacagaagctaaggtttttagatgaaaaaccaacttgtcatgcggttctttgcctttaacaaacacctcatttacttattggtcatcaagttcatttcttctacatacattatgatgaccaaagcgcctattttttattcatgccgcgattaaggtaaacatttcaaattacctttcgtttttgttactataaaggaaaaaagaaagaaaggaacgaattcatgtcccttctcactgtaaaagatgtaacgggtggatatacgaagaatcccgttctaaaaaatatctcatttgaattagaaagaaatcaaatcgtcggtctcattggcttaaacggggcggggaaaagcacaaccattcgccatatcatcgggctcatgaaaccgcataaaggtgtcattgaattgaatggacgaactcttcaagacgatcaagaggcgtatcgttcgcaatttacgtttattccagaaacacctgtattatatgaagaattaaccttaaaagagcatttagagctgacagcgatggcttacggtctgtcaaaggaacaattagatgaacgtctgccgtcattgctgaaagaatttcgaatggagaaacgtttgaaatggttccctgctcatttttcaaaaggaatgaaacagaaggtcatgattatgtgtgcattccttgttgaaccagaactgtatatcatcgatgaaccgtttttagggcttgatcctcttgcgattaatgcacttcttgaacggatgaatgctgcgaagaaaaacggcgcaagtgtcctgatgtcgacgcatattttggcgacagctgagcgctattgtgattcctttattattttgcacgaaggggaaatcagagcgaaaggaacactgacagagctgagagaacagttcaacatgagagatgcgacactcgatgatctttatttggaattaacaaaggaagaaagctatgagtaaaatgacgcaaaccatttggaaatcccgattagaggaacacatgcaagatacaagaaaatatttaaaatacatgttcaatgatcatcttgtcattgtgctcattttttttcttgcaggcggagcgagctggtatagtaactggctcaaacagattccggctcacttcccatcctactgggtcatggcagttgttttttcattggtgctgacaagctcttacgtgcgtacgttgatcaaagaagcagatctcgtgtttttgcttcccttggaagggaagatggagccttatttaaaacaagcttttaattttagcttcatttctcagctgtttcctcttattgccgtatccattgttgcacttccgctttattctgcggtgtcttcaggcggcctcaagatgtatgtgctgatattggcgcaaatgattttgatcaaggctgtgaatacagcaattcaatggaggatcacttattttcaaggaaaacagatcagatggcttgatgcagtccttcgttttctattgaatatgattttggtatataccgttttacaggcatcctatgcaatcgcaatcgttttttatctgatctatggtgtctatctcgtttacttaaccaatgcagtaaaaaaacagccttttcaatgggaattgcatatttctgacgaattaaaacgaaaacagcgcttttatcgtctggcaaacttatttacagatgtgcctcatttaaagaaacaggtgaaaagaagagcatacatggactggctcttgcagtttgttccgtatgaccagcgtaaaactttttcttacatgtatgtgagggcgtttttacgttcaaatgactattttggtctcgtgtttaggctaaccgccgtgtttgtgctgattattttgtatacaggtgcagcaggctgggtgggtgcgctgcttgtcttgttcaccgtgtttatcacaggtgtacagcttgtgccgttaacgaagcacttttcccatctttcattacaggcactttatccagttgctcagcaagaaaaggatcggagcttttttgttctcgttcgtaatgtgcttattattcaatcgatattgctgagctgtgcagtactcccggcaggaggatggcagggaagtggacttgcccttctgacttcgctggcatttgtacttgtcttcttcaagccttacgtactcagtcgattaaaaaagatgagataagcggagatatgtttctgacagcaagcgtatgatgacatcaaggaggggtccggatgaatgcagctgaacgggagttgtatgaagaagccattttttttcaaacgcgttttttaagaaaaccttcgaagatcgaacggttttcaaaaggagttcagcagcaggtgaaccgccgaatccctgctcgatttcatcaagtcatcacaagtgcggtcaaaacaatggttgaatccaccgtatcaggatcgcacttcacttcattttcggtgattgatgagcaattatctatcatcgagcgaaatgaactggcaaaggagaaagtgaagtactatcaaaaggcagctgcgatcgaaggaattggaacaggtgcaggtggtatattgctcggtatggcagactttccgctgctgcttagcattaagatgaaatgtctttatgagctggcatgtatttatggctttgatttgtctcaaaaagaagaaagactctttttgctctgtatatttcaactcgccttttccggcagtgcacatcgtcaaaaaatgatgaacatcatagatgattgggaaacgagctgcgaggaaatggattggtacagctttcagcaggagtatcgagattacattgacctagtgaagctatttcaattaatgccgatcgtcggagccgctgttggcggtgtggcaaatcatcagctgacaggacagctcggagatgtcgctcgtcatgtgtttcacttacgagtgttgaaagaaatgaaatagaaaagccgctggcgacagcggcatcagcgtgtagacaaaccctcgcattcgttgtcagggctgcgttccggtgctcacgaatgttcaattcgctccgctccggtactcgtccttcctagacttcaaaggttttctatcacactgaaaagaagacaaagggctaaaataaaaatcattttagccctttgtcaataatctaaagccgctggcgacagcggcttttttttcattcatcgtaggaaaggacggcacgggcgagtacctttgctgcgacaggcattgctttttcgttgatatcaaattttgggtgatgatggggatacacgtcttggctgttttcaggcatggcgcctgtgtaaaagaaggtaccagggacatgctgaaggtagtaagcaaaatcttctccacccatttgggtttccgcttcttttacttctgtgacaccttctgtctgttttgcgatgtcagcaatatattcagtcggctttggatgatttttgacagcaggatatcctctcacatattcatatgtgtagtcggcatcatgcatgtcgcacacccctttcacgacctgttcaatttctcgttcgatggtgtgtcgtgcactttcttcaaaggatcgtgcagtaccagttaaaacagctgaatctgcaatgacgttaaaagcattctctgccacaaaacctccaacagatacaacagcagaatcaactggattgactttacgggcaacgacttgctgcaggtttgcgacgatttgtgaaccgatgagtacggcatctttcgttaagtgaggctgtgcgccgtgtccgcctttcccctgaactcgaatagagaagcggtcggcggctgccataaagttcccgcttttataaagaacggtgccacaaggctctggagaccaaaggtgcgtaccgaatatgacatcgacaccgtctaagcagccgtcttcaatcattggttttgcaccgcctggcgcatattcttctgcgtgctgatgaatgaggacgattttcccttttaattgatcgcggtgctcattcaagattttcgctaagacaagtagtgtcgctgtgtgcccatcgtgcccgcatgcatgcatcacacctggctttgttgatttgtaaggcacttccttttcatcatggatgggaagtgcatcaaaatcagccctgagggcaatcgtcggcccgggagaagctccttcgataaaggcgagtacaccatggccgcccacctgtgtacgtgttggtatatgtaatgtgtcatagtagttggcgatgaaagcggctgtttcttcttcctggaaagaaagttcaggattcatgtggagatggcgtctaatttcaaccatttcctcataatgttcatcaagacgttcattaatgcttttttgtaaagtggatattgtcattgagtcgaaaacctccttcatgctcttttactgattgtatggtaattgttagaatctttcaacagaagaggatttcgcatgctgcatcaaaaggtcattttacataaaagtcgaagttgatatgaagcggggaaagggaggaatcgtgttgggaagctgtccaaattgttcaaaagcattttctttcgttgaaaagtttcaattatcacatacgaaaatgatgatgtgtccaagctgtcgtcatcaagtcaaagaaacctttgtctccaagatgagttttttcatgatctgcttgattccgctattggtgatgctcattcaattgaaaggtgcttcacctatgttgaagtggccgatcttattaggatggatactattgaatttctatgtgcttcagccgatcattcatcggtacgagctgacatcacgacgataaaatgaaaagcccagctattgggctttttttcatgaaaaaaagaagtgctgctttcagcacttccttaattgtctgtaacggcatgataggatgtgagaaaagcaggacgagagaagatggagccagtatcctcgtttggctgaaagaacgcttctgattcttgaaagtcttcaaataagtcctctgattcccaaagtgtcataatcaaatacacttcttcatcttttttcggtcttaacactcgaagagcctggaagccccgctgatgttctgagatgttcgtcttcttctgaaaagtagattcaaaaagtgctctgctttcaagcttcacagggatatgattcaaggtgacgaagccagattggactagctcacctttcgcataaatcacatcataggcatgaggggctttaaaaacagtctcgccctccgtctcatggaaaagagctgcttgttcttttccgaccatataaagcagattttcctgatcgtgtttctttgtgattttatgcaagaaatctgctgttccatatgtgatatagacattcatctaaaccgcctcctgcttgatagtataacaaaagaatgatatataattctttggtagtcaatccataaaacatattatgaagcaatacatcccatactatccgtataaaggaatgaggtgacctaatttgaagaaaaagaagataatcattccattagtcattgcaggaagtaccatcgtactttcatttattggctatctgaccattttatttttaggacattatgtcatagatgaaaagaagcttgtttttcacgcttcatcccaaatcattgatcagaatggaaaagaacttacaagtatgtattcagaaaatcgggaccctgtctcattaaaggaggtacctgataaagtagcgaaagcttttgtggctgtcgaggacaaacgattttatgagcatcatggtattgatgcacagtcaatttcaagggcggtttatcgagatatattagcaggaggaaaggtagagggcggcagtacaatcactcagcagctcgcaaaaaatatttttctcacaaatgacaaaacctttcttcgaaaaacaaaagaagtcataattgccattaatttagaaagagattattcaaaggataaactgctcgagatgtatctgaatcagctttacttcggtcatggcgtctacggtattcaggcagcagccaattattactttagtaaagatgtgaaagatttaactgtcagcgaaggggctacactcgctgcgatgccaaaagcgccgtctacttactcgcctgttttacaccctgataaaaataaacaaaggcgggacaccatccttaatttaatgaatgagcaaggatatttatcatcaacagaaacagtagaagcaaaagggagaacactaggcattcatttgaaaaagaaatcagaaacaccttgggtggacagctatgtcgatctcatcattaaggaagcagaatcagagtatgccatttcacatgaacaattgcttcaaggcggttataccattacagttccgatcgatatgaatctgcaaaagatcgcctacgatgcgatgaaaaacaaccgttatttcccgggaaaaagcggttctcctgaaagcagtgccgtctttattgataacgagtctggcggagtaaaagcagcgattggaggacgagaatatcaagcaaggggctataacagggttaccgctgttagacagcctggatctgttttcaagccgatcgcggtatatggtccggcaatgcaggagaaaaaactccggccttattccctgcttgaagacaaagaaaaaagctatgacggctattcaccaaagaattacgatgggcagtatgaaggcagggtcacaatggtggatgcgctcatgaaaagtaagaatacagctgcggtgtggacattaagcgagcttggtattgatacctcgaaatcatatctcgagaaaatgggaatggagatttcggataaaggacttgccatggcacttggcggcttagaaaaaggggtttctccacttcaaatcgctggagctttccacacatttgcaaatgaaggcgtatataaaaagcctttcttcattcaaaaaatcaccaatgatgaaggagaaacggtagagaagaatcgcagtaagccagaacgagtgtttagcgtgcagaatgcttggaatatgacaagaatgctgcagcaagtcgtcaaaggcggaacagcccagagcggttcatatgctggagatttagcaggtaaaacaggcacgaccacatattcaggtgtgaaaggtgcaacaaaagatgcttggtttgccggctatacgcctagtacaacgggtgcgatctggatggggtatgacacaaccgataacagtcactatttaactggcggcagtcaatacccagtgcagctgtttaaagatattttaacgacagcccaaatcaccaatgaaacgtttgaaaaaccagagggaattaaagaacttcaatcgccaatccatttagagggactttcaggatttgaagcccgctatgcgtttaaaatcaaaggattgtttacattagagctttcttgggacaagcaggaggataaacgggttgaataccgtatttatgagaagagaaatggaaacgagacgctgatcgattcagtgacaggcgtgggcagctacacaatgccgtatgccaacgtgttttcagatgcggagtataaggttgttccatataatacccaaacgcaagaagaaggagaaggcagtccgtatgtcaagccagaggcttttggacgttaatattcggcgaatttttgaacattgagccgctttagtataccgtgccttgaaaaagcggtatagtaaaagcagtgtttgagccttatacaaagagcgtgtaaggcgaaaggtggaatgaaaggtaatgggaaaaacgaaggcttttaatgacacgttcttaaaggcgtgcaaaggggaaaaaacagaccatgtaccagtttggtatatgagacaggcaggacgctcacagcctgaatatcgtgcccttaaagaaaaatacgggctatttgaaattacgcatcagccagagttatgtgcttatgtaacaagacttcctgtagaacaatatggtgtagatgccgctattttatataaagatattatgaccccgcttccggctattggagtggacgttgaaattaaaaatggaattggacctgtgattgattcaccgattcggacaaaagcagatattgaacgtcttggggagcttcatcctgaagaagacctgccatatgtgcttgataccattcagcttttaacgaaggagcagctgaatgtaccgctcattggttttgccggtgcaccatttacgatggcaagctatatgattgaaggcggcccatctaaaaactatcataaaacaaaagcgctgatgtacagtgagcctgagacatggatgctgctcatgaacaaattagctgatatgacgatcacgtacatacgtgcgcaggtaaaagcagggatcagtgcgtttcaaatctttgactcatgggttggtgctttaaatgcagcagattaccggacattcattaaacctgtcatgcagcgaattttcacagagttgaagagtgaaaatgtaccaatgatcatgtacggagttggggcaagccatctggtgaaagattggcatgacctgccgctagatgtcgttggactggattggcgtatgagtgtagacgaggctcgaaaagaagggctcacaaaaacgttacaagggaatcttgatccaacgatcttactttctccttgggaagtcattgaagagagagcaaaagatattttagatcaagggatgaaatcagatcacttcatctttaacttaggtcatggggtatttccagatgtttcaccagatacgttaaagaagctgaccgattttattcacgactattcagctaaacataaaaaaacatccatctaaactatttcaaatgatctgaaggagtgttggttgtggagaaaaagaaaatggggcttcttgtcatggcatatggcaccccatataaagaagaagacattgagcgttattatacacatattcgtagaggcagaaagccggagccagaaatgctgcaagatttaaaggatcgctacaaggcaatcggcggtatttctcctttatcaaaaattacagagcagcaggcaaatggtttgtgtgagcacttgaatgacattcaagacgacattgaatttcatgtctacattggcttaaaacatatcgagcctttcattgaggatgcagttgctgaaatgcacaaggacggcattacagaagctgtgagtatcgttcttgcgccgcatttctcaacctttagtgtgaaatcgtataacaaacgtgcacaagatgaggcagacaagctgggcaatttacagattacgtctgttgaaagctggtacgatgagccgaagtttgtggactattgggtgaaacaagtgaaggatacgtatgcatcaatgagtcaagaggaacgagattccgcggtacttattgtgtctgcacacagtctgcctgaaaaaattattgcagcaggagatccatatcctgatcagctcgcacaatcggccaaaatgattgcggaaggtgcgggaattgaacactatgaaattggctggcaaagtgaaggcaacacgccggatccatggcttggaccagacgtgcaagacttaacgcgggatttatttgaacaaaaaggctatcaaacattcgtgtatgtgcctgttggttttgtcgctgaccatcttgaagtgttatacgacaacgattatgaatgtaaagtcgtgacagatgaaattggtgcagcctactatcgtccagaaatgccaaatgcgaaaccagcatttattgatgctctggcaacagtcgtattaaagaagcttgacgaaagcaagtaatcatataaaagaaggcgatcctatgtatgacaatcaaaaacaccttgtcatcattggcggtggcatcactggtttagccgccgccttctatttggaaaaggaagtcgaagaaaaaggtcttccgattcaaatatctcttattgaagcgagccctaggctaggtggaaaaatacaaacattatataaagacggctacatcatcgaacgtggacctgattcatttttagaaagaaaagtcagtggaccgcagctggctaaggatgtcggtctgtccgatcagctcgtcaataatgaaactgggcaagcgtatgtactagtcaacgaaacccttcatccgatgccaaagggtgctgtgatgggtattccaactcaaatcagcccatttattacaactggtcttttttcagttgcgggaaaagcgagagcggcgatggatttcgtgttgccaaaaagcaagcagaccgaagatcagtcgcttggtgaattttttagaagacgtgtgggtgatgaggtcgttgagaatttaatcgagccgcttctatcaggcatttacgcaggggatattgaccgcctgagcttaatgtccaccttcccgcaattttatcaaacagaacagcagcatcgcagtttgattcttgggatgaaaaaatcacagcagcatgcgaaagcacagcaagtgactgcgaaaaaacaaggacagttccaaacgatcaatcaaggactgcagtcgcttgtggaagcagtagaaagtaagctcaagctgacaacggtgtataaagggacaaaagtgaagcagattgaaaaaacagagggaggctatggtgtgcaattagacagcggtcaaacgctttttgccgattcaaccattgtcacgactccgcatcaatcgatctattccatgtttcctaaagaagcagggcttgagtatttgcatgacatgacctctacttctgttgcaacggtagcactcggttttaaagaagaggatgttcataatgaatatgacggcactggttttgtcatctcaagaaacagtgatttctctattacggcctgtacatggacaaacaaaaaatggccgcatacagctccgaaaggaaaaacgctattgcgtgcgtatgtcggaaaagctggcgacgaatcgattgtcgagcagtcagacagtcaaatcgtcagcatcgtgcttgaagatttaaagagaatcatggatattaaagcagatccagaattgacgacagtgactcgctggaagaccagtatgccgcaatatcacgtcggtcatcaaaaagctatttcgaacatgcgagaaacgtttaagcaatcatatcctggtgtttatatcacaggtgctgcttttgaaggtgttggaatccctgattgtattgatcaaggaaaagccgccatctcagaagctgtatcgtatctattttcataaaaaacaactcccttttctgtcatggaaagggagtttttcatgttcgaatcattcgaaaagagttgggaatcataaatgtgaacaaagttgttgcatccggggaaagggatatggtatattactttctgtacttaatgaccaaaacgttcaaatagtcatttcgggagtgagatcatgagtgttgataggagacaaatgattttagatggtgcgacgaaggcatttactcaattcgggtataaagcgaccacaatggacctcgtggcgaagcttgccaacgtcgggaaaggtaccatttatacatttttcaaaaacaaagaagagttgttcgatgaaattttcacatcccttttactagagatgaggaaaattgcggatgaggcgattgatgagaagaatagtttctctgaaaaccttcacttagcactctttgcaattttagaatttcgaaaaaaccaccagctcacaattaagatttttcaggaaaatgcggagcttggcacgtcagcggtcaaggaaatgatcgaaaagatggagcagatgatcattcgctatatcaaaatgaaagtacaagaagcgatggataaaggcgacattaagccttgtgatcctgaattgactgcatttgtgatggtgaaactatatattgcactgatttttgattgggaaaagcgatacgagcctttaacaaaagaagaggtagccgaatcgctggagctttatgtcttaaaaggactatctgcaacaacataattttttttgagttcatatgaccaaattttatatttagtcattcatctatgggaggaaaacagcaatgaatttaattcggaatcaatggaaagacattgtaacgagcaaaaaactactgatcccgattttagctgtcttatttattccgctgatttacagtggtgtatttttaaaagcatattgggatccatatggtacagttgatcaactgcctgtagcggttgtcaacttggatgaaggcagtcattatgacgggaaaacccttcatgtcggcgatgatttagtgaaggaattaaagaaaaacgataatttcaaatggaattttgtcgatagtgaagaaaaggccgtaaagggattaaataacgaggattattatctcgttgtggaaataccaaaagacttctcgaaaaatgcaagtacagtgttagataaacatccgaaaaaatcgaatctgaaatattatacgaatccaggcgcaaactatgcggcgtcacaaattgcgaataatgccattatcaaattaaaagattcggtttcaaaggaagtcacaaaaaattacgccgaggtcatctttgataacttcaaaacgattgcaaaaggattagatcaagcaagcgatggcgcgaagaaaattgatgacggaacaaaaagcgcaaaagatggcagtacaaagttaaaagacaacttagccaaattggctgaaggtacgttaacctatagcgaaggtgttcatcagttcgcagggaaaatgggtgaactgaacacaggcatacagtctctagacagtgggctcggtcagctcttaacaggctatcaaaccattgatcagaaatttggagatcttggtacaggaattgatacattaaccgaaggattaaacacaagccgtgaaggacatcagcagctcgcttctaaaatgccgcaattcacagcgggcattgagcagctaaacaataaagcacaatccttttcagaaaaaattgcagcagtagaaaaagtcttatcgtcaccagaattagcgaatcttgaaaagatggcgcctaaactcgatcaggtgaaaaaagacgcaaaaacgttcagtacaaaacttgcttcattaaaagaagcattatcaaatcgagatgctaaagtaaaaagcattatccaaaacagctccatgacagatgaagagaaaaaggcggcaatggatcagctgaacagtctgcctaaaatcgaactgcctgatctgtctggactcgaacaaagcttagcggccttgcaggaactgcctgatgcaagtgaggtacagtctgcggttgcatctgcaaaagctcagctgcagcaagtcaaacagctgccaaagaaaacagaacagctgtacacgtctacagtcgcgatacaaaatgcgatcgaccaaatgacatctggtacgaataaattatatcaaggtgcattgaagcttcaaacaggtcaaggccaattacaagatggcctgcaaacagcaaatggaaagcttgatacggcgaaaagcggagcggataagcttgcaaatggatcaagccagcttagcgcagcgttaaataagctggaaagtggttcaacaaatatccaaagcaatacatctaagcttgccgaaggctcaaaatcgcttgataaaggattgggagatttaaagagcggtacaggtaagctgtccaataaattgaaaagcgccgctgatgaaacaggggaaattgatgcaaatcaagacaattacaatatgattgcaagccctgttaaaacagagaatgatacagcgaaaaagattgataattatggaacagggctcacgccttatattttatccatgggactctttgttggggctctgatgctcaccgttgtattcccaatgaaagaccctgctggacgccctagaaatgcgtttgaatggtttgtcagcaaatatagcgtgcttctgcttgtcggtatcctgcaagcagtcattgcaagtacgatgctcatctttgggcttggtcttgaggtggaaagcctctggcgcttctatctctttgcaatcatcgtcagtctgacattcttagcgatcattcagctgctagcgacaacaatggggaacccaggacgcttcattgccgtcattatcttagttcttcagctcgcagcaagtgctggtacattcccgcttgagcttgtccctaaattcttccaagtcattcatagtctgcttccaatgacgtatacaatcaatggatttagaacgatcattgcaagcggtgatgacagctatttatggcaccaagcagcgattcttggaacagttgcgatcatcatgatggcggcaacaacagcttactttgcttggaacgtaagaaaaatgaaacaagacgaagcttaatcaagaaatcctttctctttatagaggaaggatttttgatttgaaattagacatcttgaacccgaagcgatatattttaagaagagatgctataaaaggcatacatggaaggaattgctttcagacaaaggaggaaatgccgaatgacaactgaagtaaacgaaaccgttcagctgattcaaaagctcgtatcgatcccaagtccgtcagggaatacagaaaaggtgattggctttgttgaacgctttttacaggatgtaaatattgagacaaaacgaaatcgaaagggcggcttaattgccactattaaaggaaccgatgataaggaacaccgcatgctgacagcacatgtcgatacgcttggtgcgatggtaaaggagattaaatcaaatggacggcttcgtcttgcactcattggaggctttcagtataactcaatcgaaggtgaatactgtgaaattgaaaccgcttcaggccatacatacacaggaaccattctcatgcatcaaacgtcagttcatgtctatgcggatgcgggaaaagcaaaacgaaaccaagagaatatggagatccgactcgatgaaaaggtgcaaaatgcagacgatgtcaaagcacttggcattcaagtaggggactttatctcatttgatcctagagtggaagtgacgtcttcaggttttattaaatcaagacaccttgatgacaaggcaagtgtggcgctcttgctgcgactcatccaccgcattcaaaaggaaaacatcacattgccgcatacgacgcacttcttaatttccaataatgaagagattggctacggtggaaattccaatattccagaagaaacggtggaatacctcgctgtcgatatgggagctatcggcgatggtcaatcaacagatgaatacagtgtgtctatttgtgtgaaggactcaagcggtccttatcattttggattacgcaagcatttagccgcattagcagaggagaacaatattgattaccgtctagatatttacccttattacggctctgatgcatcagcagccattagagcaggatatgacatcatacatggactgattggtcctggcatagattcctcgcatgcatttgaacgaacacatgaagattctctcgtccatacagcgaatctcctttatcactatgttcaatcagaattaatcacgaaaaaagaaccccgatagatggggttcttttttcgttagcttgaaagctgtgtcggttcaggtacttcttgtccagtcatcacgcgatgtcctttttcagggtcatattgtccttcccatttagacatcacaacagctgcaagtgcatttcctgttaagttaacaactgttcgcgccatatccatgatacgatccacacctgcaataaatgcaagaccttcagcaggtacaccgatcgttcctaatgttgcgagtaatacaacaaaggaagtgccaggaacggcagccattcctttagatgtcaccatcagtacaagaacaagtgtgagctgctggacgatcgtgaggtcaatgccatatacctgtgcaaggaaaagcgcagcaatagcttgatacagtacggagccgtctaggttaaacgtataaccgattgggataacgaaagaaacaattcccttcggacatccaatgcgttccattttatccatgactcttggtaaaactgtttcagagctggatgtactaaaggcaagaagcatttcgtctttcatgtaagcaagaaatctgaaaatattgacgccaatcatctttccaataattccgaatacaacgataaggaagagagcgagcgcaaaataaacaagacctacaagcttacctaatgaaataagagattcaagaccaaattttgatacagtcacaccaatgagtgcgaagacaccaaatggtgcggctttcatcacaacattgacgacatggaacatggcgtgtgatacaccttcgaagaaggcgagcactggtttgccgcgttcaccaatggctgaaacgccaagagcaaataacacagtgaagaaaataatcgcaagcaaatcaccttccgccaatgattggaagaagttcgttggaacgatatgaaggaacgtatcagcaactgatttgctgctttgctctttttccgtttcaacatactggctaatatcttgtttttccgtatttccaaagtcaacgcctgcaccaggttgaacaaagtttgcaagcgcaagaccaagaataatcgcaaatgttgtgataatttcaaaataaagaatagttctaaaaccaagtttccctacttttttaccatcaccggcacctgcaacacctaaaattaagctagatacgacaattggtataacaatcatcttaatgagtcttaagaagaagtctccaattggttttaaataagtctcaacgcctgggttaccgaaaaagattgccccaacaacgacaccgagaataagaccgattaggatttgtgtagctaatccaaattttaattttttcatagatttcctccctaacatattcattaaaggaatattcccatcatattaagttttaatatatgaattaaagtataactaaaattaaagaggctcgtccacgattaaattatattaagaaaatacaaaattgtttgaaaaaatgaacatttagaacctcctttattgattcaagtcaataaaaagtgtcttcagaactaaaactcatcatatgaaaatactaaaaaacccttttaggacaagggttttacctttttacctattttttagaaaaaataaaaagcacttttgactccaactgacgatggaggaaaaaagtgctttttaattcaattttttaccttatttaagataacttacttgtgagcattcctcacattcattaccgtaacactcgtgttgttccattaaatcatttccacattttgtgcatttctttgagggcaaatttctaaaaaactcagtgatttttcctagcatttgtcatcctccaatacattttgttgctattattgtattataacagattgataattgtcaatctgttttgcaacaataggcaagaagaatgcttttttcatgaaaaatgggtatattgtaagaaggggatttttagaaaaggagggaaaaatgacgatgaaattaactgtcattggatgccacggagggtttccggccgctggtgaagcgacgtcagggtacctttttgaattagatggctttcgtctgcttgtagactgcgggagcggtgttctttccaaactgcagcaatacatggatatagaagaactagatgctgttctcctttctcattatcaccacgatcatattgcggatatcggaccactccaatatgcgaagctagtgggatatcatttaggaaaaagcagcggtccgcttccgatctatggacatacgggtgatcaaaaagcatttgggcgacttgcggatgatgtacatactaaggcagaggcttatcagccagaagagggtattcaaattggtccatttcaaattgattttttgaaaacggttcatccggcagaatgctatgctatgagaattcaggcaggggatgctgtggtggtgtatacagcagactcaagttatcaggacgcatttatcccatttagcaaggatgcagatctactgattgctgaaagcaatttttatgctggacaggacggatcgggtgcaggacatatgaacagtacagaggcgggcaagcttgcaagggaagcaaatgttggggaactcatcatcacgcatttgccccattttggtcgtcataaagacctagtcaatgaagcacaggcgttatatactggcaatatacagcttgcccattcagggcttagatggaacaaggaaggaagatagagatgctgtttatcgataacgaacaacattatgatccaatgattaatttggcaatagaagagtattgcttaaaatatttagatcctgatgaaacgtatttgctgttttacatcaatcagccgtcgattattattggaaagaaccaaaatacaatagaagaaatcaatacgaagtatgtggaagacaacggcatcaaagttgtccgccgcctgtccggtggtggtgcagtttaccatgacaaaggaaacttaaacttcagttttatcacaaaagatgatggggacagcttccataacttcaaaaagttcaccgagccagtcatcaaagcgcttgaaaagcttggtgtcaaagcggaattaagcgggagaaatgacattatggcagatggacgaaaaatttctggaaatgcccagttcgctacaagaggacgtattttcagccatggcacgctgctatttgattcagaaatcgaacatgtcgtttcggctttaaatgtgaaaaaagaaaagattgaatcaaaaggcattaaatccattagaagcagggttgccaatattagtgaattgatggatcaaaagatgacaacagaagaatttagaaaaattcttttaagctacattttcgatacgaatggggatgtccctcaatatcagttgactgagaaggattgggaaaagattcacgagatttctcgggatcgatatcaaaaatgggaatggaactacggccgttcaccgaaatttaatttacagcattctaaaagattcccagcaggctccattgatcttcgattagaagtgaaaaaaggcatcatccaagactgcaaaatctttggtgatttctttggtgtaggggatattgctgatattgaaaaaagactcattgggcagcaatatgatcgcaaaacgatcagcgacgtattagaagatatggatatgcgccactacttcggcaacgtatcaaaagaggattttcttgatttgatttattaaaagggacaagcacggctagagatagcggtgcttttttgattgaaagaaatgaaagcgattcacatttgatcttgtggattttttcgattgtctattataatagaaaggaggaatgtttggccataaaatgaatggctattcattcattaatgacgtgtaaggggtgggagaatggatttgatcaaaaatctagagcagacggcgatgacgaaaggagaaaatatcgcactgatctttgaaggaaataagtggacctatcgagagctgatgacaagtatcgagcgatttgcagatggattagtcaacgaagggtttcaagctggggaccatatcgcgcttattttaggaaattcaccgcattttgtcatttctttttttggtgccttaaaggcaggacttgtcgtagtaccagtcaatccaacatacacgcctagtgaaattggctatatgctgattacaggtgatgtaaaaggcattgttgcccctgaacagctactgccagtgtacgagcaggtgtacgaacagcttccgtctattgaacgagtgattatttgtgcagaaaatgaatctgcatgcagatcaagttttaaggaagtatctgatcgtcttgtcttctttggaaagcttgtgtctggtcatgcgaaagagaacgtgcatccttctattcatcaggatgatacggcagttattctatttacatctggcacgacaggaaaaccaaagggtgcgatgctgactcatttcaacctttattcaaatgccagagacgtcgctgagtacctatccattgatgaaaaggacaaggtcatcgccgctttgccgatgttccacgtattttgtttaacggtttgtatgaatgcaccattgattcatggcgcgaccatttatgtcatgccgcatttcagcccatcggagcttttgcgtatgatggaaaaagagaagccaacgttatttgttggtgttcccactatgtataactatttgtactgccaggaagggcacgaggaagcgatgtcctcagtgaggatttgtatatctggcggtgcctcaatgcctgttgccttacttcacggttttgagaaaaaatttggtgtcacggtgctggagggctacggattatcagaggcttccccagtaactgcattcaatcctcttgatggaaaaagaaaacccggttcagttgggaccgacattatgaatgtgaagaataagatcgtgaatgaactgggagaagaagtcggtccaaatgaagtcggagagctgatagcaaaaggaccaaacattatgaaaggctactatcaaatgccagaagatactgaagctgcactaagaggcggctggctgtataccggtgatttagcgagaagagatgaagaaggatacatttatattgtcgatcggaaaaaggatatgattctcgttggcgggtataatgtttatccaagagaagtagaagaagtgctttatcaacatgaagctgtagcagaagccgtcgtcatcggtgtgccagatccgaacaccggagaagctgtcgtctgttacatttcccctaagaaacatgctcacatcaatcaagaagacatcatcacacattgttcacgctttttagcgaaatataagcagccccaaacgatccatttcatagatgatattccaaagaacacaacaggtaaaattttaagaagagcactaaaggaaaagtatcaagcagaagaaagtaaataaaaaaagggagtctcttatgaggaggctccctcagcgtttagacaaaccctcgcattcaggtctgaaaaggttttctatcacgctgaaaagaagacaaagggctaaaataaaattttagctcttttgaatcgcttcttttagctgtttctgaaaagaattagactgtttttgattcagttcataataagtcccatctactaaaaaaacgacctgtgatcggctcgtccagagctgaaaggtggtgccgtttgttcggccgtacatcaccttggcgatataatctggttcctttaaatttttcttaagatgattgcttgtttgtttgcctttgtttaattcttctattaaatcttctgctgtgtccttatcatctatttcataagaagtggactcgtttgcaggtgaaagcagcaatttttctgctcgattctcatcaaagatttcgctcgtccggctgaacacataaaagaaggtaatgagtaaaagtccaaagatcacaactcctgcaaggattttcttcattttaatcctccaactctctgttttatatgtagcatctccgattttcgagtagcataatcatttttttcgcgaaagctttttcagatggggcatgctatgatggagccacatgagacaggttctaaacaaaaaaatggttgattagaatagagagagggatggaaaggaggctgaccagtgcgagtacgtaaatgggtagctcttgcaacggtagcttacatattgtacggtctttttatttattcttatttgtttctatttggggattcatcggttcctgaaagtgtaaaaggaacaagtgcagatccgcatacctttatgacaagccatgaacttgtcatcagcgagaatttctcgaacatacgtaatctgctgtatttcatgacaattccattagattggtatgttttttttcttctgctcatttcaggggtttcacgaaaaatagcagactggagcctggcagcagctcgtttcacatttttaagcaaacttgtatatgtgtttgtgttgtcgcttttgacaatgctgatttcattgcccattaagtggattggctatcagctgtctttgcactacggagtatctgctcaaagtacggcaagctggtttaaagatcaaatactggatttctggattcaatatccacttcttgccctatgtgctattgtattcttttggctcattcaaaaaagaagaaagcgttggtggctgtatgcttggtgtttgacagtccccttcacgctatttctcttctttatacagccggtcgtcattgatccgttatataacaatttttatccactaaaggatcaagctcttgagaacaagatcttaacgcttgcagacaaagcacatatcccggcagatcatgtatatgaggtcaatatgtctgagaaaacgaatacaatgaatgcttatgtcacagggattggtgaaaataagcgtattgtgttatgggatacgacactgcaaaagctgaaagatcgcgaaattttatttattatggcacatgaaatgggacattacgtcatgaagcatgtctatataggattagcaggatatctagtgctgtcacttgccggattttttgcgattgaccgtctctatttttatttttatcaaaagggagcagttccatttcggctgagggtgtcaaacgacatcgctgctcttccgcttcttctcattatcgtatcgatgctgtcatttgcagcttcaccttttacaaatgcagtttcaagacatcaagaacgagcagctgacgaatatgcggtaaacctgacaaaagacggagaggcaggggtgacgtcttttcaaaagcttgcaaaatcagggctgtctcaggtgaatccaccgcttttagtgaaggtcttccgctatggacacccaaccatgatggagagaatcatggagatggaaaatgcagcggaaaaagaggaaacgtcgaggaagcaataaataaaaaaaccggctggatcagccggatttttttcgcgcttgtttagttagaagccgcttgagcgttgattaaccctttgccgtaatagaaggagttaccaagcggtgttgccgtgttttctaagcgctggcgaacctgtgaatttgataggttcggatttttagaaagaataagcgctgctgctcctgctacatgaggagacgccatagaagttccagtataagatgtgtatccactgcttggtactgtacttaaaatagaagtaccaggtgcagaaacatctaattcaggacctgcgctggaagacgagtttctgacattgctgctgtttacattggcaacggcaattgtagaatcatattttgctggatagccaactgtacttgtagagccagtggaacctgaattacctgcggccgccacaacaacgactccgcggttatttgctgtatcaacggcatttttaagcgctgttgaaccgtttggtccacctaagctcatattgatgacatccatgttattggctacagcccattcaataccgctaatgatccagctgtattgtccgtcgccattgcggtctaatactttaacagcatatagggaagcacttggagcgaccccaagaacaccaattgtgttatcaagggcagcaatggttccggctacgtgagttccatgtgattgaaagtcttgggtggcatttggctctgaagggacgaagctggcaccgcctgcaacatttaagtcaggatgtgcagcgtggattccagtatcaaggacagctactttgacattagaacctttataaccttgagcgtgtacagctggagctttgatttgagggattccataagggacggtttgtgcatatgcttctgctttgtggtcttcttctacgtaagcaatgctagggtcatgttcaagtttttttgcggcttgttcggacatctttacttgtgcggcattaataagacgatattgcttttctagttttccgccattttgagtgacggcttgtttcttagagctgtttgtggtggcagaggctttaaagccaacaatatagctcttttcactatctgactttgagaccgtctcggcatttgccatggagcctccaaaccctgctgaaaacagaagagggacagccaataaaacacttgtcattacatttttctttttcacgcacaatccacatcccttttttcttatttcagaataatcattcgtagtctataagaatgattcgtttgattattctgtatattcagtttaagggaagtaggcaaataagagtagacccgaatttttgtgaaagtcctagcgaaaattggggaattaagtcacttggaaacgttgggaaaatatgtttgttctactgtttcagcggttatctattaaaaaggaagtgtgctttttttcttatgatccattttcggacaaatattcgatacccgaaaagccttaaaataggtagaaacgtctagcatctatttcgaatttcgatataaaaaaatattattttattttgtttttgtcgtttaaaaagaacctgttacaataacaggttctttaagaaggggaggattgagttaaatggctgaccacgttgtaatcaaggaccttccattcaccatctttccattccacataatttaagcaagcattgacaagtctcgtgttctctagacccagatgttcatccgctaaggtggtaagtaaagcatggatagcagcgccgtgtgccacgatcaggacttgttgatttggataggctgctctgactttctcaatgccttctaccattcgatcttgaatcgcctcaagcggctccatgtttggatactgtttatctggaaacagcttttggcgctcctcaaacgacatgccttcagcgtcaccataatcacgttcaatgaaatcatccatgatgacaagaggcgcatctacatgttttaaaatcaagtgagccgtttcttttgcccttgtgagtggactggaaatgacaacatcccaatggacattctttaagtaaagtcccgtttgttcagcctgccatttaccagtgtcgtttaaagggatatctgttcgtccttgaattcgtttcgctgcattccaatctgtttccccgtgtctgactaggcaaattgttgtcaagcaaatcccgccttttctatcttttcttctattatactaaagcagaaaaaaaaagactggatcagcgatttgtgagacttgttaaggattcgactgagctggcaacttgggacaccgtttgtttgacttccttcaattcgttaaggaaggtttgaaggtcgatttcaatttttccattttggtttttacttaagttcatgctgctgacgatatcatcgaagagcgaattgatttgagtcattttttctttactgtctgtcacgagtaaattcacgtccccaatgtgctgagacacaatggagatttgtgaattggtattgttgacgagttcagacacggttgaaaccgttttctttgtgtcctctgacaatttacgaacctcgtttgcgacgacagcaaagcctttaccatgttcaccagctcgtgcagattcgattgaggcatttaaagataacaaattcgtctgctctgcaatgcctgtgacaatcccaaagatttgttcaatctgtttggcgatttcttctaaacgcttaatttctgtttcaatctttgtcatgctgccatcaatttggttcatttgtgtttgttgaatttctaattcttttttaccgccgatcgatttttcctcgacctgtgctgaaatttgcgttccagcttgcgacatgtccgccatctcatcagattttgatacaagcttgtccactgcatttgttgtgtttgagaagagagaagcaagcgaatttgatgtttctgtgatttttgtatgaagctcctgctgctgctgttctgcttcatcacgaattttagaatattcattttggaatgtatccaggacaagctgctgctctaaatttaagattttcgtcgtcgctttgactgctgtctgatattctttgaaatcttggatatgctgagcaaataaatccataatcgatagcagaagatcctggaatgctgccatataccatttaggctggaggccaatccgtaaatgaacttgcgcaattttaattcgttttgccacataggcttcatcaaccacacctgcaaacatttcactaatatgaatgcggagtgtttttttcaaacgttcgacagaactattatcttgaatgatatgcatcaaggaagattcgacttctaaatttttataaaatttatcaacgatatgtgcaatattctcctgaacaattggattgagctgttttagaataaagaggtcatgctgcgtcaggtctatcattttgatttgtttcgcgatatccgtattgtttaaaaagttgattcgttttattccatcatcctgctgtgtgaaaaaagcagtgttttttcttttcgtctcttttttaaataacaatgttttggtccccccataatcatcacaaattatcagactttatattatttatcggataatattggattttttaaagggaatcagtaaaattttactgttctttataagacctttttagtggtttctttgctgggccttctactacctctccagtaatggaaaaacgtgagccgtgacacgggcaatcccaagtgcggtcgctattattccaagcgacttcacagcctaggtgagtacacgttgtatccacaagaaagatattcccgtcctctgatttaaaggcgccgcattttttatgttcgtaagatacaataccgccttcacctggctttaaatcatcaattgtttgatcggttcgttttaatttaccactgatcagcttggcagcgacattgctgttttctttaataaaatctttgacgaaagagtcagaaacaggtcttgatggcgtaaaaatcgattcgtatggattcgattttccctcaatcaaatcaccgataagagtggctgcgacatggcttgtcgtcatgccccattttctaaaaccggtcgcaacgaagatattttggtggtgtttggtcaggcggccaatgtaagggatttgatccattgtgaccatatcgtgtgtcgaccagcgatacagcacctcttcaattccaagggtggcgtctccaaacctttctaatccttcatagtgagcagattcaaccccgccttgtccagttttatggccttctcctccgatgagaaccacttcctcaccatgccattctgcggttcttaaagaatgagcaggctggtcgattcctaaatacatcccgtctggaagcggcttcgttgttttggctgctaccacataagattgttctgggtgaattcgtgtgaaataaagtcctttcccgtcataaaaagggaagtgcgaacaggaaatgatatagcgtcctgtcaggtgatgtccgtcttgtgtgacgacagcaggccggtttccttctttcacgtcaacagcagttgtctgttcataaatacgtacacctcgctctaggagctggtcgattagtgcatttagataatgaaggggatgaaactgtgcctgctgcgtcattgctagggcagctttgatgtcagcatcaaaaggaagcgctgttttccattctcggtcaatcccaagctgtttgtaggcatctaattccttctttaacttttttacaccgctttcttcctttgtataaaggtaagcatcttttatctctagctgacaatcgatgtcgtactctttgacacgagcttgaatcagctcttttgctttctcgtttgcttctacatacaatcgagctttgggcatgccaatttgctgaatcagctcatggtagtacacatcgtgctgtgaggtaatcttagctgtcgtatgtccggtcgtaccttgcagcagttgatcggcatcaatgatgatgacatccagcccgcgctctgtcatttcaaacgcagtagcgataccggtaatgccgccgccaacaatgatgacatctgctgtgagatcctcatgtacagcaggaaaagaatgcttctgactttctgctatccataacgattttgcctgttccgatcctttatgttcttgctccatattgtcgcctccagttagtgacttgttgtgtataatttttccacaatgatgaaaatcatacattcgtaaggaaactagtttgacatacataaaaaaatagccaacacataaaaataaacaagataaaaggaaggagtgggcagacgtgtcaacaaagcagccgaagaaaacattgccgcctcagcatcaaaatgaacgtccaggtctggaatataaaatgaaccctagacctgtttttgatcgagaggtgccggataaaaagttagcagggaaaacagccattgtgacaggtggagacagcgggatcggaagagcagtctcggtcttgtttgcgaaggaaggagccaatgtcgccattgtttacttgagtgaacaccgcgatgcagaggaaacgaaggactatattgaaaaggcgggaggccgcgccattttaattgcaggtgatttaggagatgaggcgttttcaaacgaggtcgtcaaaaaaacgaaagatgctttcggttccatcgatattttggtgaacaacgccggggaacagcatccgcaaaaaagcattgaacagattacctcacatcagcttcttcgaacatttcaaacgaatatttttgccatgttttatttaacaaaagcggttcttcctcatttaaagaaaggaagcagtatcattaataccacatctgttacagcctataaagggcatgaaaccttgatcgactattcatctacaaaaggggcagtcgtgacatttacgagatcattatctttatcgctcattaaacaggggatcagagtgaatggggtagccccagggcctatttggacaccgctcattccatcgacctttacggaaaaggaagtctcagaatttggcggagatgttccaatggaacgtcctggtgagccagtagagcttgcgccgagctatttgtttttagcgagcgaagactcctcttatatgaatggacaaatcctgcatgtaaatggcggaaccattttaaatggataaacaaaaaacttgcggtaaagagacgagttgctgtctctttgccgcaagtaaaatcatcatgattgatgtaagcagtgttctgcatattgagctgacaggtcgttgaatcgctttacatcacgctgatccagcgccttatcaatctcttctctaaggaaggttaagcgctgtttataaagcgcctcatctaaaaccatttgaatatagatgtctaaaatagtgacgccgttttcttcggttttttgggtgttgcgggacttcatgagctcagcatacgtttttttctctttcataaagaatccccccgatgccttttttatagtatatggattggcggagaaaaaatcaacaagaatttataatttttagacaatttatttttgagcgaaatcgacatctcttgtccgatcgacaggatgtgatatatcattaaaaaaggcttttcgatagatcgaatggactaaaaaatacgataaaaagatgatttttaataaattttgaaaaaatcctgtcgtttcttatatgttggtgatagattaatagtatctaaaataaccaaaaattaacacaggaggaaatgaagtgtcaggaattagtgaaacacctttagattcatacgtcattaatcaaacaacaatggcggtccttccggttgaagaaggaaaaagagtatattcaaaagtcatagaaagagagacaagcttttacgttgaattaaagcccctgcaaattattgaacgcagttgcagattcttcggctcaagctatgcgggcagaaaagcgggaacatatgaagtaacaggaatatctcacaagcctccaattgtgattgactcatccaatcatttgtatttcttcccaacctattcatccaaccgtcctcagtgcggctggatctcccacaaatacattcataccttccaggaatcatccctcggagacacggtggtcatctttacaaatgagcaaaccgtcgaactcgatgtctcatataaatcatttgagagtcaggtgcacagaacagcgtatctccgaacgaaatttcaagatcgccttgatggaggtcttcctaaaaaacaagaatttatgctgtatccaaaggaacaacagctcaaccttgtatacgattttatattaagggagcttcggaacagatattaactaaaaccagcggcaggacagccgctggactccttatgaagcgagggtttagcatatcgtctttctttctcgaagaaaaaaacattgataattatataaaaaattatataattcaactataacgtataaaaatttatataacgagcagcagtgaaaggggatatgataatgacttatgatgaactagatacaccggcgctattaattgataaacgggtaatgatggagaatctagctgctatgcagcagtatgcggaccgtcagcaagtcaaactgcgtcctcatacgaaaacacataaaacacctagtcttgcgaaggtgcaggaggagatgggcgcatctggcttaactgtagcgaaagtaggagaagcggaagtaatggcggcgcatgggctgacagatatctttatcgccaatcaaattgtaggcgagacaaagctcaagcgaattcgaaagctggcagagtcgatacaaatttcatttggaatagattgtgtagagcatgtgcatcaaattgaacatgtctttcgtggagcagagaaaaaagcggaggttctaattgagatagaagttggagaagaaagatctggtgtcattgaagagagtgatttccgtcaaatcttgcaggcgattcaaacatgtgacttcgttcatttaaaggggattttttctcatgatggacatacatataaggcggaaagtaaagcgcattgtcacacattatacgaagacgctgtgaatcgcacgcttcagtttgcacagattgcgaaagaaacaggcatgctgctagaggtagtgagcataggatcaacaccgccgttcttatttcaatttgatattccaaagggagtcaccgaaatcagaccaggcacttacatcttcatggatgcctctcaatccaatgtgatcggcactttttcacattgtgcggcagctgtgctgacgacggtgatcagtaagccaacaaaggcccgtgtcattacagatgttggagccaaagggctcacggctcaaacccgtacaaaagggctgacgaaaacaaaaggactaggcaaagtaaaagactatgatgatgtatttgtttcaagtgtatttgatgagcatgccatcatctatcacgaaggcttccgtcagactgtccagatcggtgagaaggtgcaaatcattccaaatcatatttgtcccgctgtcaatctccatgaaaaagcatatctcattcaagatggtgaagtagtcgaagagcttgagattgcttgtaaaggtaaacttcaataaatcaacaggatgtataatttaagacttggaaaatacaaggagacttcgtttggcatcatcatgatgacacgaacgaagtatttcttttcattagaaaacatccaccatgaacttattgaaaccaaatccatatatccagtcgtctattaagtgtatcggtagactgtcaatcaaatgacaggaaaatgtggatccttagacgtattttcatccatttactcataaatcgcagaagtgacacgagccgtctgttacaataaaagaaatcatttcttgcaaagtgttcgtatgtggtaaaggatactcctattttgaccgatatgaacgaatgggaataagaaatggaggctctgtatgaaaaaacaatcgcatttgatgctgctattcaccttgacagtgatattactagcagcctgtcagcaagcaggtcaatcgccttcaaaacaagacacaaaagaagctgcgtatgaacaatgggttcagcgttatatggatgagttaaatgaagcttatgaaaacatgaccgaccaatttatttcagatggacatggaaagatccaagtaaataaaaaattgaaaaaagcgacgaaagcctttgatcgtgtgattcaaaaggggcttgctcatcaagaagttccagccgcttatcaaaaggcggatcaacaattaaagacaggtcttcattcatttgaaaaaggaatcggtcaggtggagcagctattaaagcacccaggtcaagaaaagctgtttatttccgctacccatcatctgcaagatggattgcagcagacagctgcatttattgaagaagtaggccgcattcagcaatcaacgtaaaaaagcttggaaggcggacttccaggctttttttacatataaagtatttgctttaagcgacggacaccctcttgaatcatgttttcgtccgtacaggcgaagcctagcagtaatccctttcgattgctctcaaaacaataaggacttaatggataaatgccaacgcccgctgctttggctgcttcaatactgcctttttcgtcaaagtctggcgctccttctaaaaagacatgaagacccgtatcggttccatagatatgaaagtgcttgtcaaagtgttgtgtcaaaagggcatccatcatagcagcctgtctttttttatacagctgtctcattcgcctgacatatcgcgtgaattctccttctctgaaaaaagaagcgagtgtgatctgttccataatgggcagctgtctttgaatgagtgattgcagggaagcgatttcttttatgaccgctttggagccgataatggcagcaaggcggatgccgggtgtaagcaccttggagaagcttaagatgtaaatcacatggtcgggtgcttctgaaaataatgaaggaagcggtccgccatgataacgataatctccatcaaaatcatcctctagtatataagactgatggctgacagcaaatttcagcagctgctgccttctgttgacactcatacatacaccggttggacgctgatgggagggcgtcaccgcaatcagctttgtttgccgtggcaatgtattcaccatgattccttcttcatcgacgggtgcgggataaatgttcatttcacgatgcataaatgaaagccttgccccaggaaagcctggatcttcaacagctactgtatctccttttttaagcaatacctgtgaaatcaaatcaatggcttgctgcgtgccacctgttaacaccatttgatcttcttctacatcgattccgcgttctacagataagtattggcgtatttctgaacgtacttcccataatccgtgcggggaggaatagccccaatctttcatatctaatcgctgtaatgctttcgtgagcgaccgtttccatatattttgaaaatgttcatcgatggctggctcctgatgtcgaaaatcaatatcgagtttctcatgaaattgattggccgacagccagtggtccatttgtttctccgcctcttgaaagtgtggtcttaccggaagagggaaagggggctcactttgatggggagtggaggctgcatagtggtcactcgaaatgacctttgtaccgcctcttctagatgtgctgacatatcctcttgccagcagttcatcataggcaagctgtatagttgatcttgatacattgagctcctgtgctaatacccgtgttggtgttaactgatcgtcaggattcagtttttgtgaatgaatttgttgaatgatcccagtcacgatttgctgccagagcggggttgtacttgagcggtctaaataaatatacatcggacaccttctctcattgtcacatataacttgatgatgacacggaattatggagtggtcaatagcatcatttttggatataggaagtaagccaaaaggtgtgtacactgttctcatatgcttatgacatagaggagagagtcaaatgatccctgcatctaaagaagaaacagcacacctatccatcattccatttatattcgttttatttggtctttttatgattacgaccgcagtgaatctgcaagtgcccctttatacgttgtatgcggaacaagcagggtacggaaaggcggatacagcacttgtatttgctgcatatgtcttcggactgattccagtcttgctttttcttggtggcatatctgatcgggctggacgcaaaccggttttattggtcgcgctaagcttttcgttatgtgctaccctattgatgatcgtgcaccctaccatacaaatgctctttgcagcccggctgctgcaaggggtggggcttggtctgagtgttggcacatgcaccgcttatttgattgctttatatccagaaaaatcaagctggattccaacttttattgcgttatgcagttcggttggctttgggggcggtgctctttttacggcactgctttcttttcagcgtatgtcgcttgcgcctcttagctattggattgtgctgggccttttaatcctaaccatcgtgggtgtcttctttttcgttccgcctgtacaaggagattcaggtaaaccgatgatgaacatgccaacatttccaaaaggaacaatgccggcgaatgcagcgattgccatcgcgtggtcggtgtgcggcctcgtcatttcggttttgccagcacagcttaaattgaatggatatgaattatgggtagggccggcactctttttgattaatatggcaggtgtcctgatgcagccttttgttcgcaagatgaatagcacagtagcgctctttgccgggtttatctgtcttccatgcggatacggccttttgctatttggagcaaatagcgggtccatctttcttgtgcttgccggaacgatgcttgcgggtactgcctgctatggatttacttatttaggtggtcttcagcttattgtcgaacgggggaaaaaggaggcagctagagccgttgcagggttttacttgtttgcctatttaggcctgggtattccgagtgtttttatcggtctttttgctgatctgtacgggacccagatggtgttaaccgtctttttcttggtcgttttggctgcttgtctcatccttttgatctcaagtgtcagacagaaacaaaagtgaggagtcccgctttctctttttccttctgttcgtttaaaataaaggcatgagaggggaagatgacatgaaaaaagtgcagctggacggcgcatcgtgcaggtcgcaagaagagcttcatgaccaactaaaaacagttttacaccttcctgactattacgggaaaaatcttgatgccctatgggactgtttgacaggagaagtaaatcttccaatagagctgacatgggtaaattttgaaacgagcaaagacgctcttggcgagtatgcagaaagcgtaaggcagttatttcaagaagcagaagaggaattgaaaggacaatttcaagtgagcattcaataatggtgaaaaagcagccgctgccgcaggctgttttttcatgagtttccgtctttctcaatctgctattgaatattttactagatatgataatatatgaactgtcgcttaattgataatgataatcatttttagcggaaagagcttgatagaaagagagaaaccagtatgaagttgtatcaattaagtttattatttgtatgtttggcatgtgtatcactgtttgtcggtgtacaggatctgtccattttacagatgtttcatttaacagatgaacaattacatacgttagtttcaagtcgcatcccgcgtctcatgagtattgtgcttgctggcatgagccttagtttatgcggctttattatgcaaagcatgacgaggaataaatttgtttcaccaaccactgcaggaacgatggattgggcgaagcttggtattttagcagcaatgcttgtttttacacatgcgagcccgctcatgaaaatgggaatcgcgtttctatttactttagctgggaatcttcttttcttaaaaatcctgcggcatattaaggtgaacgatacgatctatgtaccgttagtcggcttaatgtttggcgggattgtcagttcaatatctacgtttatagcctataaatatgatctgatccaaaacgtatctgcatggcttcaaggggatttttctcttattgttcaggggcgttatgaactgctctatgtgagtgttccactattgatcatcgcgtatttatatgctgaccgctttacagtggcgggtatgggtgagagctttgccatcaacttaggtttaacgtataaacgtgtgatggcggttggtttggtgatcgtttcgatgattacatctgtcaccatattaactgtcggaatgttgccattcctaggcttaatcattccgaatattgtatcgatctaccgcggcgatcacttgaaaaagagccttccgcatacagccttactaggagccatttttgttctgatttgtgatgtgctcggaagggtgatcatttatccatatgaaatttcagttgggctcatggtaggcatcgtcggaagtgcgatcttcctgtacatgttattaaggaggaaacgctatgcataagaaacgtacattatgcctgattgcagccattgcagccgtgctgatcgtgattttcattacctttcaaatggggtactggccgtacacagtgccaagtcgtttaaagaaagtgctggcgatgacattgacgggaggcgcgattgccttttcatctgttgtcttccaaaccttgaccaacaatcgaatcttaacgccgagcatactaggtttagacgcactgtacttgtttttgcaaacagcgattatttatctgtttggctcgaccaattttatgatcgtcaataaaaacctgaattttttcctttgcgttgggctgatgattctattttctgtgctgttatatacggtgatgttcaaacgcaaaaataaacacattttcttgcttctgcttgttggtattgtctttgggacattgttcaaaagcctttcttcttttatggaaatgctgattgatccaaatgaataccaggtcgtacaagataaatcctttgcaagctttaatcacatgaacacagatatcttactcattgcttctgttttatttgcggcgctgtgcctttacatttggacattccgctccaaattagatgtcatgtcacttgggaaggagcatgcggtgaatctgggaattgactatgacagcatcacaaaaaagatgctgatcgtgatagccgttcttgtgtccatcgcaacagcacttgtcggaccgattacgttccttggcttactcgtcgtgaacgtcgcacgagagctctttcggacgtaccggcatacatacttgctgctaggctcttttttcatcagtgtgattgcccttgtaggcggggagtttcttgtagaaaaggtatttacttttcaaacgccgctgagtgtcctgattgatttagtaggcggattgtattttatttacttacttttaaaggagagtcgttcatggtcgtaatgaagggagtcagtaagacatataacggaaaaacagtgcttcacaaaacaactgtcagtgtgaaaaaaggacagctgacctctctcattggtccaaatggtgcgggtaagagcacgcttttgtccatcatgagccgcttgattcagccagacacaggtgcagcttatttacaggacaaaccatatagcgcgtatcctccgcaggagctagcgaaaaagatgagcattttaaagcaggccaatcacatgagtgtgcgcctgaccgtacgggagcttgtcagctttggccgttttccttactcacagggccagctgacaaaagaagatgagaagatgatcgatgtgtctcttcaatacatgaggcttgccgatatccagcatcaatatgtagatgaactgagcggcggacaaaggcaaagagcctttattgcgatggtgctggctcaggatacggattatattttcttagatgagcctttaaacaacttggatatgaatcattctgttgagatgatgaagctatttaagcagctcgtcaaagatcttgggaaaacaattgttgtggttctccatgatattaactttgcatctgtgtattccgatcatatcgtcgctttaaaagatggacaggtgatcaaagaaggcggagtagaagaagtgattcaaacagatgcacttgaacaaatttatgacatgcgcataccgattgaagtcattcacggtgagcgtatttgcttatatttttcttaaaaaatgaagaggtgatcaagtatgaaaaaatggatttggatgatgactgtattaacagcgattgttgtactcgctgcctgcgggaaccaaggaaaaacagaaggaacaaaagaggaaaccgtcacggtaaaagacatgctcaataaagacggcgtgaagatcaagaaaaacccgaaaaaagtcgtcgtgtttgatatgggaagtcttgatacgctggacaaactaggtgtggatgtgacagctttaccaaaacaagtcgtgcctaaatatttatccaaatatgaaggtgacaaatatgagaatgtcggcggtttaaaagagccgaacttcgaaaaaattgcagagttagatcctgatttgatcattatccagaaccgtcaatcagatgcattcgatgaattttctaaaattgctcctacgattttgatggatgtagacactgccaactatatggaatcatttaaaaagaatgccacgacgttaggggaaatttttgataaggaagacgaagtcaaaaaagaactagcagccattgatcaaaaagtagatgcattaaagaaacaggcaaaagagttgaaacagaatggtttaatgatcatggccaacgacagtaaaatgacagcctttggtgctaagtcaagatacggactcatccatgatgtgtttggtatcacgccggcagatcaaaagcttgagccatctgacaaacacggacaaagcatttcatatgagtacatggtcaaaacgaatccggattacttatttgtcattgatcgaggcgcagcgatcggagaagaaacttctgcgaaacagcttgttgaaaatgattatgtgaaatcagtcaaagcggtcaaaaacaaccatgtggtgtatttgaactctgacatgtggtatttatctggcggcggccttgaatcattgactgccatgattgatgaagtaaaacaaggaattgaccaaaaataatggaagaaaagctgctcatactgagtggcttttttattgtattcataaaaatatgttgcgtgcaggaaactttcatcaaaatatgttatagtggaacctacattgatagactaagatagagtgagggttcggaaaggatgaaggaaaaaacaagatcaaaaagaaggctgagaccttgggtgaaagccgtgctgtttatcatggcttttgtcatggtgatggcagtgtccgtgacaggatatgcttactataaaatttcaaaagcgtcggataaggcgcaagtgtcattagaaagaggagacacctcgcaaaagcgtgtgaaagcttttgatccaggaaaagacagcttctcggtgctcttgcttggaattgacagccgtccaggtgaaacggtagacgaagcaagaagtgatgcggtcttactggcggcggtgaaccgaacagagaaaaccatcaagctcctcagtattcctcgtgattcttatgttgatataccgggaagaggatatgataaaatcgcccacgcccatgcgtttgggagtgcagatttgtcagtcaaaacagtcgaaaacttgctgaacattcctgtagattatgtgatttcagggaactttaaggcgtttcaagacattgtggatgagttaaatggaattgacgtcacgattgaagatgaaggtatcgcaaaacaaatggaaaaggattcaaagggaaaagttcatgtgcagacaggcgcccatacattaaatggtgaagaagcattagcctttgtgagaacgagaaaggcagacagtgacctcatgcgcggaaagcgccaaatggaagcacttcaagccatctttgaaaaatctaaatccatttcttcgatcccgtcatatgacaacatcattgatacacttggtgataatgtttcaaccaatctgtccatgaagcagtttatcggtcttttcccgttattgagctcattgaaatcagtggataccattcagctgaagggccatgattatcagcctgggaatgtgtattactttgagttagatggcgctggattagacgaagtgagaacagagctgagagaacagcttgaattatcataaataagtaggagcctgccgctgtggcaggctttttgctttgaatgggtaagcgcgacaatgaagcaaattcagttcgcttgatgaagaaaatactgagtcagcagttcctctacccggtggcgtatacgtggattaaagtatttatgcttttcttcatagccatctatgataaatagataagttgtaaatccttcatcgtgttcaatttgctgtaccttcattttttctttacgtaaatgctgcttcagttcataaagtgctttctgtgcttcctttaaggcagaggtcacaagctgaatgtatggttcatttagtttaaatgtttgatgttgttttaagtgagtcaaatcacgattgaggatggagatgaccattggaagaaagatggcctgttccatcatctgaagctgtattcttgatagtctcgtcatgtccaagcctgctttctttatttatggaacacctgttcttatttattatatcggatgagtcaaccaatctcaagggggcaggggggattcatttgtatatttttatgttttccatgtaaaatgaaaagtagacaaaccttgaaggagtcaaagaagttgacatcatttctttccctatttactcatgaaaatatcacatcattttttgaaagctacaaggcctttggaccgattgtggccatattgctacccttaatagaagcatttcttccgtttttaccactcgttgcgtttgctgtagcgaatgcaaatgcatttggcctttgggaaggctttttattgacctggattggcgcaagtgcagggtctattcttgtctttttgctgatcagaaaatttggacagatgagaatgctcaactttatcagtaggcatccttccattaaaaaattgatgctttgggtggagaagcgagggtttggtccgttatttattttactttgctttcctttcacgccctctgctgctgtcaatgttgtagcgggtttatcaagaattagcttttggcaattctcattagctgctttatctggcaagtgtgtcatgctttttatcattagttttattggctatgatctttctgctttagttaagaatccgttaagaagtgtttttgcggttctagttatcgcgttattatggtatgttggaaagagagtagaaaataggttgaacattcgaatgagcaagcgtgaggacaaaggaggctcttaatgaaaaagaagccattgctatggttgatgattattacaggcatcgtcttattgttccaagtaaagaatttcatgtttgtcacgtacaaagtagaaggggttagtatggacccaacttttacagatggaacagaattattaatcaataagttctcgccaaaactcacgaaaattagccggtttgattatgtgttatttcacggacctaaaaatcaaatcttgatcaaacgggtcattggactcccaggagaaacgatcaagtatgaagatgatcagttatttgtcgatggtgaaaaaaagaaggaaccttatttaaaagagcagaaaaaacataaaatggggaacgtcctgacaggagattttcagctgaaagccatcacaggagacgataaaatcaaaaacaatcattactttgtggttggagataaccgaatacatagctttgacagccggcattttggcaccatttcaaaggatcaagtcgtcggtgtcaaaaggaataccagcgaataaaaaaggcgctctgcatatgcaaagcgtctcttttttattttgcggctttataatcaggctgcctttttgcccagacatgatgtaagaaccggaaaaacggtggcagcattgcaatgacgagaataattctgacgacttgtacagccacaacaaaggtagaatcctcgtgaagtgtgaccgctgttgttgccatctctgcaataccgccaggcgaaaaggcaagaatggctgtaatgacagaaatgcctgtaatctcagcaatggcaatagagctgaggacagtcgcagcaattagcccggctgagctgacgacagccacaatgagagtgttttttagtccaacaaacatctgtttattcatttttgatccgatggttgcacctagaaatacttgagacgcaatgttcgcttgtgccggccaataaggaatcaaatcataacctatgagtgcgcccgcaccaacttgaagagctgcgacgcctagcatgctgccgatcagccaaggggcagggaaatgaagacgaactgccaggcgtgacatgagccaggcacctaaaataagtgcagcggtccaagagatgtttgacagggtgaaaacgcccgaagagaaggcacttccttgcgtagctacaaccgcatccgcttcgttttttgtatttaaataaaacactgtaaaagggatagtgagtacaaccattaatacacgtatcgtttgcacgagactcacaacagctgtatttgctcccacctcttgggcaatccccggcatagcggataaaccgccgggggcagttccgacaaagcttgtcagcatatctgttttgctcagcttccataagacaaagcctgagagcatcgccagtagaatagaaaagacgagcatgaaactcacagggagccaattttcagcgaaaatgtgaaggaccttcatattcattttctgtccgagttcgattccgagaatgaattgaccaaggagcagccatctgctgtgaatacgtaaggtgctggttcctttacgctgaaacagggtggggcggcgcatggcaataaaagctgctgtgattaatgtaccaaccatccagccaatagacattcctgttaaagacaaaagaaatccacctaaaccgcttatcgcaatcagaatgagatcggttcgaaggctgtttccttgtttcatcacatgtaaaccttcttcctatatgtttgttcagtaagtgaaatgttgttatcttcactataatacaaaagtctctataaataaaatacgattttttttaccattttcataagattatcttatcaataaatggttagcaaattcttataaagaaagaaataatttttaccaaaagcaaagtcaatatacaacgattttcccctatttatcttatcagttgactatcattttcaattacactacaatgcttagtgtggggtgataacatgaaaattccttcttttaaatataatgaaaagggattgaatcgtttttttggtcctttagagggaagaattatggagatcctttatcaaggtgaggatatgccgattaaagaggtgcagcagaagctgtcagatgaaaagccgattaatttcaacacggtgatgactgtgctgaaccgcttaaccgaaaaaggaattgtggagaaaaaaacaaaagggcgctcatctatttataatcccattttaacaaaagaagaatttctaaatgagcaaacaaaatggattacgcaaggattgatggacgatttcggtccattggcagtgaatcatatggtggatgcgattgaaagtgctgatcctgaattactcaaagttctagaagcaaggctagcatctaaaaaagaggagcagcaaaatgaataaaatgaagtcgagtctgctgtttttaggcggtatattgattggtttagccattttttatcagatggggtattacgtgctttcaagcttttttggctggaaccaagcatataacctgatccatgtatgccagtccgtgctcgaattttatggattcactcctttaaagtattttctagatgccttagtcctctacacattgggatttgcaattttctatatggcaaagcaaatcagcaagtacattcaattcaaacgacatatgatgttggcagtcgaacaacagtcaaccgaatctctgtcagagaaatatcaaaacgatatcattgtgtttcactgtcaagaaccgcttgcctttgcaatggggatgcttcacccaaaggtttatttatcaacagccctcatggacatgctggataaagaggaaattgacgctgttgttcatcatgaattgcatcacaaatacagctatgatcccttaaaagctttcatgttctcaatgctcacaaaagtcatttggtacattccagtgttaaagcatatgagacaaagctactctgtttttcgcgaagtgattgcagatgactatgccattcagcagacaggtactgagcttggagtagggcaggcccttttgaaactgattaaaaagaaaacccagtttcaaaaacaaacaaagtttgcggtgtcctttggagatcgggcattgaatttaagaatacaaaaaatcttaaatccaacttacaatattccttttaatgtaccaattattccaattgtcacatcagccattctgatggtggtcttaatgattatgctcaacttaaattactaattttttttacttattaacattacattatgtagtgtaaaaacaggaggaattcactatatgaaaacgaatcaagaaataggaacactttttgtacgcgttattttaggtattattttctttttacatggacttcaggcatatcaaggaggactgggaggaacagcagcattctttgggcaaatcggtttacccgaatttatggcctatattgtcaagacaattgagctagtcgggggtatcgctttgattttaggtctaggaacacgtattttcgcagcattatttgtaccaattatggctgtagcgattattactgttggtttttctaaaggatttgttggcggttatgaatttgaactttcgctgctcgtcatggcgctttatttaacacttagcggcagtaagctgttgtcaattgatggggttctcaagcatcagcagcaaagcaatgaagcaaaatttcattaaaagatcgtgaaaaaactccttctgcatttgtggcagaggagtttttttaatggtcaaattctcattttctcgtttgaaaatgaggaagggatgtgagactttgctacatttagcgctaactttgacatattgaaggaacgaaaaatcgatttcattttttgacggaacatacgatctcctattaaaataggactatctaagacacatggtgcgttaaaaggtataaaaaccatacagcatgctgctgttcatcttgagcgatacgtttcattagctcttttgttccttggtcacggacatagtctgatacgcttaagtaaaaatcgaccgttttttgttcatctttaaaggcaaacataagtccttctctgaattgttctggacaaggttctgttacgcttggtttgtggtttctacctgttaaagaataatatagctttgaaaatagttgatagtgtctgacttcatcctgacgtatttcttgaatgacctttttcgcctcagggttttttgctttttgggcaagtttttcgtagcattggatcgcagaatattcaccattgatcgccttctcaaggtctgaaatgatccttgtgttttggcgcatgtcatatggcgagtagtcatagtaatcgtaatacatgatattgccagcctcctttttgttcatgatggtttatgatatgaaaagagtgaggaaaggtgcctatgttatttcaatcagataggagaacgggaacgtgataggaaaatagctatttccctttattttcgctagaatatgagtacataagaaaggtgttgtggaacgtggagattcagtttttagcaggcagatcggggagtggaaaaacgactgcaatcttagaggaaatcaaagaacagcttcggcttgatccgttgggtccgccaatcatttttttagtcccggatcaaatgacatttttaatggaatatgagcttgcaaaaacgtctgaagctggcggaatgatcagggccaaagtatttagtttcacacgtcttgcttggtctattttacagcagactggcggagcgaaccggcaatttgtgacaagcacaggaattcaaatgcttttaagaaaagtgattgaagagcagaaagaaaagtttaaagtgttcaaaaaagcgagtgataagccgggatttgtggagcaaattgaaaagacgatggctgaattcaaaaggtattgtatgttgccggaggatattgaaaaaatttcaatgtcgagcatgtattcagagtatacagaagaaagacgggcagccgaaaaattgcatgatctgcatgttctttatcagcagatggagcagcatttacaagatgaatatgtgcactcagaagactatttgacacttctcacgcagcaaattccttcatctgaagaaataaaaggagcacacatttatatagatggtttttatcaatttacaccgcagcagcttcttgtcattgaacagctcctgctgcatgcagcaaaaataactgctgctttcacagtggatcgctcctatcatgataggcagccaaatgaacttgatttatttcgtatgacagggaaaacgtatttccagctctatcagcttgctagagagtgcggagctgacatttctgaaaacgttttggaaagaaataaacgacacatttatacaccagatcttgcttatttagaacaccaatatgagcagagaccagtgcagccatatcaggaaaacacccctcatctcacagtgtctaaaagtgcaaataaacgagctgaaattgagggtgtagcgagagatatacttgatttagtgagagaaaaaggacttagattgagagatatctcgattgttgcacgacatgtagacgactataaagacacattaaaagaggtttttcgagattacgatattcctttttttattgatggaaatgaatcgatgcagtatcatccgctcattgaattgattcgttcgagcttggatgtcataaagggaaactggcggtatgaagcggtatttcgctgcgtgaaaacagagttcttatttccgcttgaactcgctaagaacaaagcgagagagcaggcagatcagctcgaaaactattgtattgcttatggtgtaaaaggagaacgctggacaaacggttcccggtttcattacaggcgcttccaatcattagatgaggattttggacaaacagatcaagaaattgaaatggaacaaatgctaaatgacgtcaaagaatggatcgtgcccccgctttaccagttgcagaaaaggctcaaaaaagcgcaaaaggtaaaagacatggtagaggctgtctatgtctttttagaagagatacaagtaccagataagcttgaaaaagcgaggcttgacgctgaagaagcaggtagattagctgaagcaatgcagcacggacaagtatgggatgcggttattcaattaatggatgaatttgttgaaatgctaggtgaagaagagctctcatttcctttattccaacaaatgatggatacaggattagcttctctaaaattcgctttgattccgccttcactcgaccaagtatttattggaagtatggatttatcgagaatgtatcaagtgaagtgtacgtttatcgttggtgtaaatgatggcgttattcccgcacgcccctctgatgagagtgtattgtctgaggatgaccgtgaatggttaaaacgagcaggagcagagctggcagagacaggaaaggaacggctgctagatgagcaatttttaatttaccaagcgttatcgagtccatcacgtcatttgtatctatcctattcggctgctgatgcagaaggacgttctcttttgccttcgacacttatcaagtattgccaagagcttatgccaaatcaccagcaggctctttatgtgttagatccagaacaactggatgacgaggagcaattaaaatttgtagcgaatgagcatgtttcgttatcgtataccgtttcacagttgcagcaatggctcaatcaatatcccattagtggtgtatggtggagtgtctataactacttaatgacatctcctcatcgggatgtatcaaaaaacatcatgtcaagtttgttttttacaaatcgagcgaagccattaaagcctaatgtcacaaaagagctttatggtgatcatattcagggcagtgtttcaagaatggagaaattcaatgcgtgtgcattttctcactttgcttcccatgggttaaaactaaaggatcgacaattttacaaattggaagcacctgatatcggccagttgttccactcggctttaaaacatatttcagatacgcttgttgaacaaaaaaaggattggaaaaacctaacgaaggaagattgtgtcacttattcaaaacatgcgattgaacagcttgctccgcgtcttcaaaaggaaattctattaagctctaatcggcatgcttatattaaagaaaagctccagaaaatcttgattcgagtctcttctatattaagtgaacatgccaaagtgagtggattttctccagtagggttagagttaggttttggggggcaagggccattgccgccgtttacttttcaattaaagaatggctgcacgatggagcttgtcggaagaattgaccgggtagataaagcagaaggttcaaaagggctgctcttgagaatagtcgactacaaatccagtgagaaaggtcttgacttagcagaagtatactatgggctggccttgcaaatgctcacttacttagacctgaccattacgtattcgaaagagtggctcggggttgaagcgacgcctgctggcattttatatttccatatccatgatccgcttattcaagcacctattccgcttgcagaggatgacattgagcaggaaatattcaagaaatttaaaatgaagggtttattgcttgaagatgtagaagcagtaaagctcatggatcaaacgcttgattcaggtagatcacaagtcattcaagccggcttgaaaaaggatgggtctttccgttctgactctgcagttttaagtgaagatcatttccatatactcacacaacacgttcggcgcacatttgaagaagcaggcgaaagaattacaaatggagaggtcgcaattaatccatataaattgaaggatcaaacaccttgccgcttttgttcattcaagtctatttgccaattcgatgaatcaatagaggataatgattttagggtgctcacctctgagaaagatgatgttgtgatagaccggatcaaaaaagaaggggatcagtatgcaaataccaaaaccgaataacagtacgtggacggatgaccaatgggaagccatcgtttcagaaggacaagatatcttggttgcggcggcggcagggtcaggaaaaacagctgttttggttgaacggctgattcgaaaaatgacccggcctgaacatccagttgatgtggaccgtctgctcgttgtgactttcacaaatgcatctgcggcagagatgaagcatcggattacagaagcacttgaaaaagaattagccaaaaaccctgggtcccttcatatgagaaggcagctgtccctcatgaatcgtgccaatatttctaccttgcactccttttgcttgcaggttttgcgcaccttttactatgaaattgatcttgacccaggctttcgtttggcagatcaaacagaaggagaattattaggagatgaagtgttagatgaactgttcgaggatgaatataaggctggaaagccatcattctttgaactggttgatcgttacacttctgaccgccatgacttagatttgcaatggcttgtgaagagaatttatgagttttctaggtctcatcctttacctgagcaatggatgagggcattcctttcactttatgatgtagatgcacaaacaaaagtagaagaattaccgttttatccatatatcaaagaagatctttctctcgttctccggagctgccaggagctgcttgaacgagctctttcgctatcaaaagagccgggcggcccagcaccgagagcagcgaattttatagatgatttagagcaagtcaatgaattaatctgtcatcaagatgattttgaggagctttacgagcttttgccgaacgtcaattttaaaaggctcaaaacgtgcaaaggggatgaatatgaccctgttttgttagaaaaggccacagatgcacgtaatcaagcaaaaaaacaactagaaaagctaaaagatgaatactttatgcgcagtcctgcccagcatttaaaaagcttagctgaaatgaagccagttgtggagacgcttgtagagcttgtgatccaatttggtgtgcgtttcgagagagcgaagcaggaaaagtcaattgtcgacttttcggatttagagcactattgcttacgcattttagcggagcaggatgcagaaggacatttgatcgaaacagaagctgccaagtactatcaacagcagtttgaagaagtgctcgttgatgaataccaggatacaaacctcgtacaagaaacgattttaaagcttgtgtctaaaggggaacattctgcagagggcaatctgtttatggttggtgatgtaaagcagtccatttatcgttttagactggctgagcccatgctctttttaaacaaatataaacactttcaaccagacggcaaagaaacagggaagagaattgatttaaataaaaacttccgaagccgttcagatgttttagatagtacgaactttttgttcaagcagctgatgggggaaacagttggagaaattgaatatgatgaacaagctgaattaaagcttggagcgagttatccagaaagcaaagatacaacgacagaaatgctccttgtccacttagatcagcaggaagcagaaaccggcgaagagcgagaagaacttgagaccgtccaatttgaagcgagaatcattgctaaaaaaataagagaattggtggagcagccatttcaagtgtacgatgcaaaacagcaaatgacccgtaacttgcagtatcgtgacattgtcattttgcttcggtctatgccgtgggccccgcaaatgatggaagaattaaagaagcagggaatcccagtatatgcgaatctttcctctggttattttgaagcaacagaggtgtctgtcattctttctttgttaaaagtcattgataatccatatcaggatattccgcttgcagctgttttaagatcacctattgttcatttagatgaaaatgaaatggcacttattcgaacgagtgataaaaaaggcacttattatgatgctgtaaaggcattcatgagtgtgacgcattctgatcaccctacatgcaaaaaattagagcgatttttccaattgctgcgtaagtggcgtgatttctccatcaatcattcggtggcagaattaatttgggaagtataccgagatacgcagtatcttgattatgttggcgggatgcctggaggtaagcagcggcaggcgaatcttcgtgccctttatgatcgagccaagcaatatgaaaaagctgcctttagagggctatttcgattccttcgttttattgaaagaatgcaggagcgtggagatgatcttggtgcggcaaaaacgttcagtgaaacagaggacgttgtgcgcatgatgacgatccacagcagtaaaggattagaatttccagtcgtctttactgcaggactcggcaggaactttaatatgatggacttaaaccagtcctacttacttgataaagagctaggctttggaagcaagtatatccatccagagctgagaattagttatgcgacattaccgcttgtggcgatgaaaaaaaagatgagaaaagagttattatctgaagagctgagggtcttatatgtggcgctcacaagggctaaggaaaaattatttctggtcggctctgtcaaaaatcaggtgaaagcattaagcaaatggcaaaatgccgcgactggagaagagtggctgctccctgattttgaacgttatcaatcgaaaacatacttagattttattggccctgcccttatccgtcatcaagcgatgtcatctgttttagaagaaacaggcgatgttgttctttcgcatccgtctacattcactatctcgtttacgcaagcttctgatcttctaaaggaagatatgtcacttgaaaagaagcagcaagacgaggtagtacaagcattgatggatggtctgcctgttgaaggatatggtgatgctgatgagaaggtggcagagagactttcatggaaatatccatatctagcggcctcgcaagtcggcacaaagcagtctgtttccgagataaaaaggatgaaagaaatacaggatgagtacagtgttccttcttctattcgaaaagctcgtgcaacattgtatgaccggccggctttcatgaagaaaaaaacactcactgccgcagaacaaggcaccgcaatgcatacagtcatgcagcatatcacgcttccttctgaggagccctatgatgaatcacgtataaggcacctgctcaaatccttacagcagcgagacttgctaacagatgagcaagtccagtcaattgatcaagaaggaattgctgctttcttctctacttcaattggtcaaaaactgctgaaagcggactgggtaaaacgagaggtatcatttagtatggtgttacctgttaaagaggtatacagtcatattgatactgagggagagcctgttctgattcaaggaatgattgactgtttatttgaaacagatggaaagctatttttactagattataaaacggatagagtgcaaggcagatatacaggtggacttgacgctgctgaacctatcttgaaaaagcgctatgaaacccaaatagcgttatatgcaaaagcagtagagcgtttgacaaacagaacattagaggagaaaattctctatttcttcgatgggaatttagaaatctctttataaatgtatcggaatgagaggtgaatcacatgaggattctgcatacagcggattggcatttagggaaaacccttgaaggtcgaagccggcttgatgagcaagcacagtttttagatgaactgtatcaaatcgtgaaagacgaacacattgatgtcattgtgatggccggtgatgcctttgatacagtgaatccgcctgctagagcagagcagcttttttatgaaagtctatctgccttatctgataaaggaaaacggcaggtagtggtcatctcaggcaatcacgataatccggatcgcttatcagccgcatctcctttaacaaatgatcagggtattcatttaattggatatccgacaaatgacatcatccgtgtcgatgttccttcttcgagtgaacgtttatccattgcagcactcgcttatccgtctgaggctagactaaatgaggtgctggctgaaacatttgaagagaaagtgcttcgtgatcattacaatttaaaaattcaacaagcgtttcaacatttaagtactcaattccagccggatacagttaatattgcaacaagccacatttatgtggcaggaggaagtcaaacagattcagaaagaccgattgaagtaggcggcgcatataccgttgcggctgaaagcctgccagaagcagcttgctatgttgcacttggtcatttgcaccgcccgcaaacgatcaaacgtgccaaaacgattgcccggtattctggatcacctcttgcttatagcttttctgaatcaggctatgccaaatcagtcacaattgtagaggcaaaacctaatgaaaaggcaagctggaaagaagtgtttttatcaagcggaaaaccacttgtgaaatggaaggcgactgagggactgagtcaagtgcacgagtggctggatgaaaaacgtgatcttcaggcgtggattgatttagagattcatttaacagaccagctctctattgaagagattcatcagctccgtaagcagcatagtgggtttgttcacattcgaccaaagttcaaagaactacagcaaatagaagagcaaaagcaagtggaaaagctctcgatcgaagagcggttcgtgaaattttatgagcgccagacaggtggcggtctacccgatgaaaaaacagtcaaactgtttttagagctagccaatgaaatgcaagaggaggaagcgacttgaagccgattacgctgaccattaaaggacttcatagcttcagagaagaacaaacaattgactttagctcattatgtgatgcaggtgtgtttggcatatttggaccgacaggaagtggaaagtcgtccatattagacgccatgaccctggcactctatggcaaagtggaacgtgcgttaaataatacacatggtattttgaaccaagcggaagaaaagctgtcggtttcctttacatttgctttgcaaaaggaacaccatatttcttataaagttgaacgtgctttcaaacgagcggatgaaatgaaagtcagaacgacattatgccgcctgattgaaatcggtgatacgcagaccgttctcgcagataaagcgagtgaggtcaatcgtaaagtagaagaattactcggattaaccattgatgattttacgcgagcggttgtcttacctcaagggaaatttgcagaatttctctccctaaaaggggcagacagacgtcaaatgcttcagcggttgtttaacttggaaaagtatggggatcagctcgtcaagcgtttgcgtgcaaaagctcagaatcaatatgggcaaaaaaatgaactgctggctgaactgaatggtttaggggaagctggcccagaggcgctggcaaaagcaaaggaagcagcagagcaggcaaaagccatttttcatgagaaaaaacaagcgcgggacgaagcgttcactgcttttacaaaggcgcaagcgatctggcagtatcaaaaggaacaagaagcttatgagactgaacaaaacaaactgaatctactggcaccatcaatggaagagaaaaaggccaagctcaatatcgcagagcaggcagaggcgctaaagccctatgcggatgcattaacaaaggctgaaaaacagctttctcaagcatcaaaggagaagcaggaagcagaaaaacagctgctgcatcaacgaacgatctatgatcaaatgacgcatgagtatgagcaagcccggcaaaagaaaatagagactgagccagaacttctccaaaagaaagagcagctgattcatctaaaggaaattgaacgaaaaaaagagacagcttttcaggaaaagacaggaatagaacagcaaaaaaatgaaaaaacgcagcaattcatacaaaagaaaaaagaagcggacaatcttcaatctctattagagcgtgcactgacgaaacaaacacagctgaagcatgagctggagcagttacaagtctcagtaaaagaacggaaaagtgtacaggatgctttacgtttaagtgaaaatgttgaaagaataaaccgcagcattcaaaaagaaaagcaaaagctggaggagctcaaaaagcgagcctcacagacttcagaagcatatgaaaagcttcaaaaacagcaaaacgaccatcatgaaaaaatagaccaatcgtttcaagcaattgaacacctctatttttatgtatgtgaattcgaacgagctctaacagaatggagtaaaaaagaacaacatcagaagctcgaaaaattaaaacagcgtgatgttgtaagggcggctgaattaagaaaagaattagcggcagagctagtagatggtgagccatgtccggtttgtggatcaattcatcattatccaaaggctttggaatccaatgaccatgaagaaaccgtggcacaagtcgatgaagtcattcaacggatggacaaagagctcaagcaggcagaggagtatgcgagagacatgtatgccgcaaagcagctcctcgaaacgaatgccaatcaattagtgaaacaattcgctttcttatctcagaaagccccgggagcagaagtagctgcagcagtagaaaccgtacaaaatccgcagtctttgcaggatctgatgcaagaatggagaggcataaagcaggatattcaagaagttgaacgtaaacgagctcgtttaatggatgaaacgcataatcaagcagcagagatgagcaagatgaaagagcaaatgacttttgaacagcagcgcatcgaagaattagaggtgctgatcaaagagcttcaatctgagctttcagagcaaacgactcaatttgaacaggccttccctcattttacattgaatcaagtacaagagctgcaaaagcaaatcgatgaaaaggaccaacaagcggaaggctataaagaacgtattgagaaaagcatttcgtttttggaagaaaaacagctagcaaaagagcagctgcagacagcgatatacaatgtcgagaaagaacttgataaactagcgcatcagctagaaagtcagcatcagcttatccatcaatatgaaacagatttaggccgatatccattaaaagctgcctctatttctgatgaacttattgaggttgaacattctcttgctcttcttaatgaaaaagaacagcaatcgtacaagcaattgcagcacgcgcagcagttgtttagtgaggcgcaaagccatttttcaagcagtgagcgtcagcttcaagaggcgaaccggcgaaaacaagaagcagaagcagcatgggaaaaagaaacagaatcctctccttttcatatgccgcaggaaattgagtctgcttcaatggaacaggcagtacgtcaatcggtcaaacaggaaatggaggaatttgaggataaaagaaaggaatgtgccgcaaacttaaagcgaatttctgaattactgaaagaagagtcactggatgaaaagcagtggactgacattcagcacagaaaagatgcagctgaaaaagcattggaagaagcgacagcaatgagtgggtccgcacatgaacacctgcgtgtgattgaagaaaatcatcagcgctttgcaagtattcacgaacgcttggaagcactgcagcaagaaattgatcgcctcgataaactgcaaaccgtttttaaagggaatacgtttgttgaatttttagcagaagaacagctggaaagtgtcagtcgtgatgcatccgcccgcttgggtatgttgacgagacaaagatatgcgattgaggtcgactcagaaggcggctttgttatgcgtgatgatgcaaatggtggtgtcaggcgtcctgtgtccagcttgtccggcggggaaaccttcctgacatcgctggcgcttgcccttgctctttctgcacaaattcagctgagaggtgaattcccgctgcaattctttttccttgatgaaggattcggtacgctcgatcaagacttgcttgatacggtcattaccgcattagagaaactgcagtctcacaatttagcagttggtgtgattagccacgtggaagaattgaaaatgagactgccgaagaaactgattgtccatccagcagatccaagcgggaaagggacaacggtctcaatggaattaatgtaattgttgaggtgatgacagggtggcaaagcaaaccattggattatgtgagctgtgcggaagacaaaatgtcctgctcacagaacaccacttaacaccaagagaagaaggtggggcttttttagcgactgccttcctgtgtatcccctgccataaacaagtgcatgcactctttacaaaccaggagcttgccgcacgcttgaacacacttgatgcactaaggcaggatgaaaagcttgcttcgtacatcaaatggattcgaaaacagccggcaagcaagctggttaaaacaaaaaaatcgagacaacgcagaaaaaaataagcataaaaagcgctcctctaaatgaaatgactgtagaggagctgctttatgcattgcctaccatattctgatcatttaagtcaggatccacatagttggtggcgctgatgccattatttaatatcaagaaatctccggtatttcccgctccagagcctaaagcagattttgacgaacttttaggcgacaggtagaatgagtcaccgacgtttacgacgcctccagaaatagagttaatgtaaatgggtccgacaattgctggcataatcgacatcctttattcgaagtcatatcaccatcatatgcgtaggtaggtccatttgtgagtttggcggactttcgtcgttgctaaataactctcgaatatgcttcactcttgcaacgccattcactccacacgtagagccaatttgaaacacagaggaggaagacaccccttctacatgtattgaagacactttaatcacaggcttttcatggtaaaatgctgttctgacggatcgttccggcagcatcaatggaataggctcataatacacttcaaattctttcgcatttaagttttctgcttcattgccataaaacaaactaatggttcgttgaacagctaacaccttaaccttcgggcatagctcctgcgtatcaccgatttgaacaacacttgaaatccccacagaattcaccttcgtgaaactcacttgagatgtgcgctttatcattatcgaggtgccagaggaacaaacgggccaatgataagagattctggcggtgtatcaaaaatggaggataattgtacatgatctgtgtccccgatgataaatagggaagaggacgaaaccccaactactttaatgcatccggtctcgatgttgcggttgacgactgtgaaattcatccgttttcctctcctttcgtttcatttggaatatgggctaagaaatgctcaatcgctcgtttgacatcatgcttcacatattcagcaatttgctctgaacgctgcagcggggtcatatcttcccggtgcgggagctgtcctgcatagtatttgattctgctgtcaatttgcttgcgaatgtcctcaatgatgtggtgtttgttgctctcatcaagagacccttcatatcgctgctctagctcttcaagaagttctggcgcttcttcatttaagaatgcgtcgacaagctggcgtgtttgattgaaaaattgatcagccatttcttgctgcatcattccaatacccggggttgttgtttggcccacttcaaagttttgaacactgtttggatcagatggattgaggccgatgttcagtgtgccttcaagccgctcgattttcagttgatcaaattgataatcaatccgttcaatcgtcgttgtcggtttatctttgatcatttgcatttcctgctgaagttcgttaagccttttttcaagcatcataatttgttgtgtttgcttttgaatgatgccatgcacctgtgaagcgttgctttgataatcatacattgacatacacctccggggatagcagatgaacttaagttgttggtgactgaagcggtacaaaaggtgttgtgattgcgccttgggattcttcaattccttgtgtacctgctgcggcaggtgctgcttctacgtagctgcccgtgttatacagattagaaagagctttaattgaaccagcgctcccaatttgcagcacagaggagttactgacagactctacacgcaaataattaatttgtatcgcttgattaatatagaagttcaacggattctcactccttacaagttaccaacaagcggttgatcaatgacatcactgtcgtacgtatttgtcacacttttatagttgctaatgcgcaattgatcaccagtgttaaaactgcctgcgccagcaaacgttttaacctgactatttggagaaatggtgatacagtctccaacatgaacgactccgctcgttccgacggcatttactttaaaggctccaacaatagccggcatagcggtgcacatcctttataaaaataaggcactttgtttttgggcgtttcaccatagcttatgatgggtcttttaatgtgtgattgtctttttgaaagcttttgatgagaggaattaggtgtatggtttacccttttttagagcattcattcgaggtgtatttgatgcctttatttaagagtgtatcaagctcttgactgcacctgatggtttcttcggcattcatcccgaatttttttgctgtctcaattaaatgtaatcttttttgttcaatttcataattgatcataacggacgccaactctcacattttttatataatagaaggatatggttagtataccctatttttctataaaaaaagctgtttcgtcaatatgagtaataaagtgacaaaattcgaaagcgtccttacgtgccatatatctcttttcttatttcagcctgtaaataacgtcgtcttttgttgatatactgccggatgacctctcgttctgattgtaggatgtctttgcggtctctcgtataaggatcatctccaattcggttctcgatagaagcatgccatttttcgatgattggacaaagccggtcttctaaaaaatgagtattgagtacatgctgaaaaagcgtgtaataggctctcttaaatgaagggatatctagtaacctagcagttaaagtattaaagccgtttactggaatataatcaaatgccatttcttctccatgaatgtcacggccccatgtcgcatcataatcccaaggaagtacttgaaattttccttgttcattcacataaagagcgtagttatggacaaagccgtcaaagttttgtgtgcacacgacaccaatgagccagcggaaatactgtgttacatctaggtattgctcaattttttctgcaaatatgtcatctttcgctgtgttgagaaagtaaataaattcactcagctgctgatcgtgttgagaagtccccgtttttttctcgtacccgaggaggaggtgttttttgggctttttatcaaacgaactcaaaagggagaagttggcatcgtcatcgactgcataataaatgccgcctcctgaaagctgccttttctgaaaaaagtgctcatcaacagattctatttttaaataaatgccttcttttcttccgtttatagtgagaaacacatgagacgcagccgggcttagcacccctatctgctcgaagaaataaaaggacagcctgtttcggataaacgaagggtcattgtactctgcatttaaatgaaagatagattcgccttgtctttgctttggcttacgatattcaatttgataggacttttttttcagctttctaatgtgagacccgcggtatgaagcataaatatgtgatttgatctggccggttttcaaaatggcttcaacaggttcgtcgttccatatgtcttttcttaattcaatcaggtcctttggatgaatccaaatatccatttgctttaaaggttctgtggtcatgcgttaatcatcctcctatgctcttctttacgatatgaaaatgaaggaatgtcctgtacccgtttgttaggtattcatggagttttaaaagaaaggggcatccgccaagaacacttgtctaccaagtctcgtaacataaagcagagaagataaacagcttgatctgtttgttttgtcaaagtatagactgggaggggaatcgttcgtgagcacatttgatcattcacatattgaacatgcagtggattcacttcgaagtgaaggacgtgatcatcacttagatcgtgaaccagaatcgaaacgatcgcacaagtcagcacgttctcgccattcaaaacgccgtcattggttctttggtggaggcggatgccgtaaatcacaccgcagtaaaaaaagctgcaagagctatcgttcgaaaaaaagtcgctgttcaaagaaaagcgtgaaaagtgagaaaccatgcaaaagcaaaaaatcgtgcaaaagcaagaaatcttgcagaagtaaaaagagtgaaccgaaaaaatcatgccgcagcaaacacagatcccatcataagaaaagctgccgcaagtcacatcgcagccatcgatctaaacgatctcatcaccatagaagctgccatcgatctaaacgttctcatcaccataaacgcagccgctcttgcaaaagatgtggaaagaaaaagcatcattcccacagcagaggaaatgttgatcgcaaatgggaccaagggaacatgtgggagtatcgccgctaccgctaaacatcagatcatcttttttgaaaccctttttaaaagagagtatgataaaaaagggttttttttatttcatagagaaataaaatgagacatcatcacttagcgaaatgaagattgtgaggggaagacatgaagttttttacaggtgagatacatagcagaatgtttattggggtagtgattgatgatgaatgggtcatggacgtcaaaaaggcagaagccaaattatttgagcttgagacactgccaaactctttagctgaatgtattaatatgggggacaagtttgttgagcatgtcaaacagctccttgactgggctgagaaaaaagaagaagaccgcggttcttatgtatatccgctttcggaagtgaaactccatgcgccgattccaaagccagctaaaaacatcatgtgtgttggaaagaattatcaagatcatgtcatggagatgggaagtgcagcggatattcctaaagatgtgatgatctttacaaaggcacctacttcagtcgttggacatgaagcggatattctccttcatgaagatgtgaccagtgagctggactatgaaggggagcttgcgatcgtgatgggcaaatcagggaagaatattgcacctgaagaggtccgtgattatctattcggttacaccattttaaatgacgtaacggcaagagatttgcagaaaaaacacaaacaatttttcataggtaaaagcttagatacaacctgcccgataggaccttatattgtgcataagtcagtggtcgaggatcatggtgcgctccatgtggaaacaaaggtaaacggagaggttcgccagtctgccagtacagaattaatgattttctccatcgagaatattgtttctactctttcaaaagggatgacactagaagctggtgacatcattgcaacgggaacaccttctggggttggcaaaggctttgaaccgcctaagttcttagcttcaggggatcgaattgacatcacgattgagccgattggaacgctatcgaatcgcgtcaaataaagagtgcgatgacacaggattgtcgctttgtgttcgacttatttcgtggtacgatgagaaggtaattgttctgataaagggggaaataacagatgggaacgcatttacatattacagcatgggtgctagggattattttattcttcgttgcctttgctctagcaggtaaaaatgacaaaggtgctaaaattgtgcacatgattgtcagactattgtacttgatcattatcgcaacaggcgtagagctgtatgttcgcacaggaatgaaaattccaggtttcggtggcgagtatatcggtaaaatgattctcggtatccttgtgattggcttcatggaaatggttcttgtacgcaagaaaaaaggaaaatcggtgactggtgtattgattggttttatcgtattcgccattgtgaccatttttctcggtttacgtctgccgatcggtttccatatcttttaacataaaaagggcattgcttatacgaagcagtgtcctttttatatgccatcaaactgtgaaaccgaccggtgaccgtcagaagtggtccattcaaaacgaatttgacctgcggcggagtcatggtgacattgaagggcaagtgattgtgaatctgtcgaaaactgaaagaaagaaactcgttgaaaagaatgaaaggaggagaaaacacaatcgtagacggaaaaaccaagctgctctacctgtgcaatgatttcataaaaaacgttttcaggaacgaacatcaggaggtcaagccatcctttggcaagtgatgccgtatattgaatcgcttcaccgccttgtacttctactagctgcccactttcatgaagtatcatggacccgagcagttccccttttgtccacctgccattttccttcaaacagatcatcgtgctttgaagactttctggcagcatgatgtctccttcttcatcttcaatcagacaatacccgttttcaatcagtaaatacccgctgcaccatcttcgactgcagcgttcaagctgcttcattcgtttttccatttgcaaaagctcctttcctctttcttttcttaccaaatcatgcttgtcctatacgcccgagaaaaaaaggacaaatcaactatcaaggagacgatgcataaactaagaaaggctgaatgagaacacttgaggaaaaacggatgggagctgatgatgatgtgtggaataacaggctgggcagactttaaaaagcagctcatccaacaggatcatgtaatcaatcaaatgacagatacattatctaaaagagggccagacgatacaaatacgtggaaaagtgagcacgttctatttgggcataaaaggttagcggttgtagatgtagaaggcggaaaacagccgatgacatatacacatcaaaaccatgcttataccgttgtatacaatggagagctctataacacagaagatataagaaaagaattgttaaaaaggggccaccgctttcttgggcattctgatacagaggttcttcttcacgcctacacagaatggaaggaagagtgtgtgacccattttaatggtatttttgcatttgtgatctgggatagtgagcgtgaattattatttgcagggagagaccggctcggcgtcaagccatttttctatacagaacgtcatcattcctttttatttggttcggaaatcaaagcgctacttgctcaccctgatatgaaagcaaaagtcgatcatgaaggattatcggagatctttggtttaggaccgtctagaacaccagggcaaggagtgtttaaaggggtaaaagagctgagacctgctcatgctttgactttttcaaaagacggactgcgtgtgtggagatactggaatgtcaaaagcaaggtgcatacggactcacttgatgacaccgcacagcacgtcaagcatctctttacagatgccgtcacaagacagctcgtttctgatgtgcctgtttgtacatttttatcgggtggcgtcgattcgagtgccattaccgccattgccgctaagcactttgagaaaatagggaaagcaccgcttcatacgtattcggttgactacgaaggaaatgatcaattctttgaagcaagtcaattccagccgaatgctgacggtccatggattgaccgcatgaccaaggcgtttcaaacgaatcatcacagctgcgtcattggacaaaaggagctggctgcttatttgaaggaagcggttgaggtccgagacttaccgggtatggcagatattgattcttctttgctttggttctgtcgagaaattaaaaaggactttgttgtcggtttgtcaggtgaatgtgcggatgaaatttttggaggttatccttggttccatgcggcaaatgaaacgaatggttttccttggatgagatcgacggaagccagaacgcagctcttacaagattcgtggcaaaagaagctgtcactaagagaatatgcacaaagcaaatatgaagaaaccgtggctgaaacgcctcttttagatggagaaactggagtggataaagcccggagagaacttttttacttaaatatggtctggtttatgacaacgctgcttgatcgaaaagaccgaatgagtatgggggcaagtcttgaggtacgtgtgccatttgcagatcatcgccttgtcgaatatgtatggaatattccttgggaaatgaaaatgcatggaaatcgtgaaaaaggggttttacgaaaagcgttagagggaattttaccgaatgaagtgctttatcgcaagaagagtccttatccgaaaacacatcatccagcctatacccaggctgtgaaagagatgttaacagattgccttgcgcaaaaagattctgtccttcacgaatttctagatccacatcaattaaaccagctgattgaaacggaaggagcctcctttcaagtgccttggtatggccagctcatgaagggcccgcagttaatcgctcatctggcgcagattcatcattggtttgaaacgtatcgaattgatatagaagcgtaataaagggtcggctttcttacatttgttgaagggaagtcggcttttttaatacatagcatgagacgaatagagcacatcaaaagttgatctaatctttctaatttgtataattaacttaaagtgaattaatttggaggaaaaaggataatgaaaatcattgtgatcggagcaggaccagggggacttgcggcagctatgatgcttcaaagcaaaggacatgatgttcaggtatacgaaaaacagccctttgttggcggacgtaactctaagtttcaactcggtgatttcacgtttgatacgggtcctacctttctcagcatgattcatattgcagaggagctgttcacctttgctggtaaaaatctttatgactatattgatgtgatcgaattaaaagaaatgtatagattgatttttcaagacgatcagctagatatgattcgagatcgtgatgaaatgtatagacggttagaagcctttgcacctggtgagggcgaagggtatttacgatttatgaacgatacaaagcgcaaaatggatcagcttacacctattttacaaagtaaaatggatcgttttcatcactatttgcgtccaaaggtgctcaaagcacttccgcagctttcattgaataagagtttatatgatgtgctgtcagattatttctcaaatgaatcagtgaaatatgcgtttacatttcaatcaaagtatttaggcatgtcaccgtgggagtgccctggtgctttctccattctatcgtttatggaacatgacacaggtgttttccatccgaagggcggggtcaatcagctgtcagaagcgatggcaaaagcagcggttgaagctggagcgacgattcatctgtcagctggcgtcgaaaaattgctgacggaaggcaggaaagtaaaaggcattcgcttagaatctggggaagaaatacaggcagatgaggttgtcgtaaatggagactttgcacatgtgatgacaaagcttgtagagccaggacttttaaagaaatatagcgagaaaaaattaaaaaagaaaaaattctcatgctccacctttatgctttatttaggattagataccatgtatgaggagccgcatcataccatcgtattttccgatgattatgctcaatttgtcaaaggcataacgaaaacgtatgagctgccagatgatccttctatttatattcaaaatgcaagtgtcacagatgactcgcttgcgccaaaaggaaagtcagctctttatgtgctggcacctgttgccaacaatcaaagcggtattgactgggaagcgcatcaagatgaatttagagaacttgtgctggacacacttgagcgaaaaaccggttttaagaatgtgagacagcatatagaagtcgaacggatgatcacaccgaagcaatgggaggaagacctttacgtatacgaaggagctacatttaaccttggccaccagctgacgcagatgatggtcctaaggccgcacaatgaatttgatgaattggaccattgctggctcgtaggaggagggacgcacccaggaagcgggctgccgaccattttagaatcagcacgtatcacgacaaatgcgattctttcaaaagagaaacatacgcacaaaacattgccgcaccaagaaaaggggagtgcctcatgaaaaaacatatattgattgcaggtggcgggattggcgggatgatctcagcactttatttaaaaaaagctggacatgatgtcacgcttgtcgaaaaaaatgagcgacttggcggaagacttgcttttgtacgtgagaaaggatataaagtagatgaaggtccgaccattgtcctacttcctgatatgttaaaaggtattttacatgaggttggaatggacgaagcatctcttgatcttttgcagcttgatccgctgtatacgattcaatatcaagatggaacctcctacacgaagtactctgatgcatttcgtcagctagaggaaatcagacgtgtatttccaaaggaagatcaaggatttctaaggtttatggaagaaatgacagaccgttttcaagaagggcagcaagcctttctagagaaatcatttcatgaaaaacgtacattttttacaaaagcaaacatgaagattttaatgaaattaaaggcgtatcgaacggttcaaagtgctctgaaaaagtatttctcagacgaacgcctgcgagatgcatacgcactgcaaaccctctatgtcggagggaacccgtatgaagcatctgctatttattcgctcgtttcatatagtgagcacgcacatggaatctactatttaaaaggcggctatgcgagcttagtagatatactggagaggcagctcataaaaatgggtgtgcatgtaagaaaaaatgaagaagtcacggagctagagtttgaggggaaacgcgtggttagagcaaaagtcagtgacgaccgtatagcagctgatgcatttgtgatcaacggagattatccagctgcgttaaaacagcttggtttagacgaacaagatcggcgtaaatacgtgccgtcttctggctgtgtgatggtgtatctagggttaaacaagatgtaccatgatgcgcctgttcaccaattttttatgggagaacactttgatcagcatatgaaagaggtttttcaaacgaagacgatccctcaagatccgtcgttttatacgtttaatccatcgatcattgatccatctcttgccccggcaggctgtagtgttttatatatgctgattcccgttccctcaggagatcatatcaactgggaagaggagacagattttgtagagaaaatggtggatcgtcttgagaaaagaggctttccaagattgcgagagtcgattgtctgggaaaaaatcagaacaccaaatgattccttgcgagaaggattgtttgaaggcggcagctttggacttgcgcctaacttgtttcaatcaggtgtgttccgcccgcaagtgaaggtagctgagacgggcaatctttatgcagtaggtgcttccatccatcctgggggcggagtgccgatcgtgatgcaaagtgcgaagctgatggcttctgtgctgttaaaagatttgaatgacagaaaggaagtgaagctaagtggttgatgtacaaacagcattgaaattatgtgaggagacgattcaaacccattctaaaacgttttaccgtgccttttccatgctgcctaaaaagaaaagacaggccgtctgggctgtgtattccttttgccggagagcagatgatattgtagatgagtccccctcgccaaaagaggagcttgcatcctttcgagagacgtttgatcgatttttacatggtgaggtagatcggaatgatccgatgtgggtggcgctagaacatacatttcaagagtttcgtatggatgaagccccgttccgtgacttgctccaaggtcaagagatggatttagagcagcatcggtatgaaacgttagatgaactgctcatctattcctaccatgtggctagtaccgttgggcttatgctgcttcccattattgcaccgcgtaaaaaagaacagctgaaagaagcagccatttcattagggattggcttgcagctgaccaacatccttcgtgacatcggcgaggataaggctgaaagagaccgcatttatttgccaaagcaagtcatggatcaattcggatatacagagcaagaattgcaagaaggcattgtcaatcaagcatttcagcacgtatgggagtacattgcctttgaggcagaggcatactacgaggagttttttgaccatcttcatgaattcccgctttattcacgtatatcagtgaaagcagctgctcatttttataaagccattttagataaaacaagagaaaatgaataccgcgtgtttacacagcgatcatttatttcaaagcaggaaaaagaacttattttagaagatattacgtaaaaaaggactgcacccgcagtcctttttatgtggaagaaaagcgatactctgtccatacccttgaacgccaccgcctatacataaagatgcctcttacccattcatccacgataaaagaaatccaaactccaatgagacccatctcaagctgaatgcctaaaaagtaagcgatcggaagcccaatgccccacattgaaatcatcgccatatacactggaaacttcgcgtcaccagcagcccgcaaggaattaataatgaccatattaaaagaacggcccggctccaaaataattgttaataggaggagtgtggcggcgatttgaatgatctcgctgttgctagtgaagaaagcaagcaaatgcgtcgatgataaagataaagcagtggaagaaagaagggagatgccaatggcccagtataagcttttcatgcatctgtgataggcagcatcgaattccttcgccccaatatggcgcccgattaaaatttgtgtcccttggctaatggctgcaccaaatagcataatgaacatcattaaattttgagtatagacctttgctgctaatgcctgcgtccccataaacgtaataaacagtgtaatgatcatttgagagccgttataagaaagctgctctccagcagaaggaatcccaattttcagaagcttttttaaatgtgtccgctggatgtgaaacatcttcttcagtgaaaagcgtaatccaattcggcggcgtacaatgaggatcattgccattaatccgatcaaccgagcaagtgaggtagaaaaagcgacccccatcacacctaatacggggaagccaaacggaccgaaaatgaccagatagttaccggcaacgtttagcaagttcattccgatggtgacatacatcgtatctcttgtatatccatagctttttaaaatagcactatacgtcataatgagcgcttgaataaaagaaagcagtccgacaatttgtaaaaataccgccgcatccggcatgagctcacttgataggcccatcaggtgtaaaatgggaacagctaatacaaacatgagaagactaatgacaaagctaatcaagaagttggttcctagtgagacataggcgacttgagtcgcttcctgcctgcggctagctcctaaaagctgcgcaatcacaatcgtcgttccagttgtaatgaaactgaacatgacaatcaataaattcaggagctggttgcttacaccaactgcggcaacactattatcggaatattgactgagcatgagggtatccgcgcttcccatgagcatatataaagagatttcaataaaaataggccaagttaatgcaaataatgaaggatgggttttcttacccctagcttgaaccttttgaattggcagtgattgaggtttcatcaatcaacctcctttcgtataaatccgatttatagtgtaccttgcatcgactataataagaagagatgaaaccgaaacttattggagaaatccgacttcataaggggatgaatatgaatcgatttattacatttactgtaccgccgttcccggtttatattgcttcaggcaaaggtgtatttcatcaaggagaaagacatatctctagaaccttcactgtgtttgatcttctttatgtcacaaagggggaactatggatcacagaagacagagaggctcatcacgtaaaagaaggagaatatatcattctctcacctggcttgtctcatgggggacacctgccatgcgaagaagaaactcactatgagtggctgcatttttcaattgatccatttgagttgacgaatcggctgagagaacactggtttgatatgaaacaaaatcaagccacctttgaaaagccggcaacatatgaatttagcctgcctcgtataggaaaagtgaaaggaagaaatgtgttcgaaaaacatctttcagcaatgcgtgcactaaatgatgacgcgtctgaactgccgctgaaaaagcagcttcagtttgaggaaatgctcattcatttacaaaaagaagcatttcatattccaagtgcaaaggagaatgtcgcctcagaagtggttcattatcttgagcgtcactttatgaagaaactacaaatggaagagcttgcagagaagctgcattatcatcctgattacatgacaaggtgcatgcagacggtatatggactgacgccaaaccaatacatcaatcgtctcaaggtcgaaaaagccaaaagcatgcttgcctcaacgaatgataaaatcgcagctattgctgatcacgtaggcattgacgaccctacttatttttctaaactgtttcggcaaaacgaaggcatgacgcctatcgagtaccgtcatctagcaaaaagaacgacaaagtaaaggaacgtgaacagatgaaaagggaaaaggaagagcatgtgagcatacaagcattaaacgaagccgatttagagatggtatggcatttaaaattcaaagcaccagatcagtcctatcgaaagtggaatgccccatatttttatgaacacgaaatcccgcttgctgcatttaaaaaacgatacttacaggacacatccattccgccaaagctatatggcattgaaatagacggcgaaatcaaaggcaccgtgtcatattattgggagaatgaacgtacacggtggcttgaatgcggcattctcatttatgactcgcgcttttggagcggtggcgttgggacaaaggcgttaagtctatggactgatgagttatttacacacattgatatccctcgaattggtcttaccacatggtcgggaaatgaacggatgatgcggtgcgcagagaaatgcggatttgtccttgaggggagactgcgaaaggtccgttactatcaaggagaatattatgattcgatgcgctatgggatgctgagagaggaatggaaaagcctcccgcgacatgctacttaacaatgatgaatcgttttaggacaaaaggatcgaatgtttgaataaactgaagaagaaggggggctaaaaagcataatagagaacatgtaatttacataaggaggagtttgaacgtgagaattacggggttattcgtttcacttgctgttgccatttatttatggtttgatgcgccaaagcatgataaagacaaatggctgtgggccattttaggtgtcctatttagtaccatcgttctcggtatttatttgatcaagacagagaggaagggacttggctggaccattctcattttaacgatcttgttttatctcatgctgctcatctctgttttgatcggtatcattcttttttatcaggtgagtccttcatgaagaagggcttttttcttttaccttttgcgcaggcacacctgcaataacaatcttctcctcgtgaaaagaacggtttacaacagcatttgctccgattgaaatatgatttgcaatatagatgtccccaaacagcttagcaccagggccaatccatacatgatccccaatggttggcacatccttttcatgatggttctgaccaatattcaccccttgatgaatatcacaaaatgccccaatttttgcatgcttgttcacaattaagagacccgtatgattgattctaaggccagggccgaagacaccaatcggaatatcaaagccaagctgcatgcctttctttttatgtaaatagcgataaaaccatttgcgaagtgtagcgccgctattagaatagtattcatattttcgtaaaatcctttgatatttccatatatcatccccaaaccacttaggtcttttgcgcttaatggctaatgctttcttgtcctgagctaaatagtggtgaagatcatgctttgttacaatcatcagatccctctccaatcccttttgtttcagagaaattataccattataaccatttatatcaatatagaatgacgtttctttctttctttttctacatcactttcatccacttacctgtataaaataagtgctttgtcatgaatagaacaaaagaaccaggaagaatgatttgtaatttttttctacatcattccgtctcacgcgtttatttaccttatagcagtagaggtttgtcaaaatgacacgaaattactcgctaaaaagagaatatagcattcatatgcttttcgaatcatctttttgaatacaattgactttcatatctcacatcctctaggctagtaaatgaaaatgataatctttatcaattggaggagtgttttattatgtccatcaaaaccgtttctaaaaatcagcaatttttagagcagcaaagtcaaagagaatcgaatgcaaggtcttacccgagacggttcccattagccatgcaaaaagccgagggtatgatcgtgacagatgcggatggcagagagttttatgactgcctggcaggcgcaggaacacttgcacttggtcacaatcatccagttgtgatagaagctattgaacgtatgcttcatgaaaaaagaccgttgcatacgttggacataacctcagaaattaaagaagagtttgtgaatgaaattttttctcacttgccagaagagtttgcaaagagagccaaaattcaattttgtggaccaactggtggtgatgccatagaagcagcaattaaattagtcaaaacagcgacagggaatcgaagcattctatcattccatggtgcgtatcacggtgcgacacatgccacgatgtcattaagtgggaatttatctccaaaagaaagagtgcaagggttaatacctgatgttcattttatgccttacccatatgaatatcgctgcccatttggaattggtgggaaggattcgcaccgcatttcaagttcgtatattgagcgtgtattaaatgatcctgaaagtggtattcttccgccagcaggtatgatctttgaagcagtgcagggcgagggaggctccattccagcatcgattgaatggatgaaagaaatgagaagaatcacaaaagaaaaagggattccgctcattattgatgaggttcaatcaggcatcggccgaacaggtaagatgttcgcctttgaacatgcaggaattgtacctgacgttattgtgctgtcaaaagccattggtggtagcctgccgctttcagttgtgatttatgatcaagatttagatcaatggaatccaggtgcacacatcgggacatttagagggaatcaaatggcgatggctgctggaaccgctacgcttaaatttatcaaagaaaccaatctgcttgatcatgtagaacggttaggagatcgtatgcaggcgcatctaaaagacatccaaaaacaagtccctgctctcggcgatgttcgagggagaggtttaatgattggcgttgaagtagtcaatccaaatgagaaacaggatgtggacggaagctatccagcgaatccagagctggccagtcttattcaaaagaattgcttcgataaaggcttaattgtggagacaggaggccgtttcggaagtgtgattcgattcctgccgccactcattatgacagaagaacagcttgaaaaagtcatcgctatctttaaagaggccgtgtacgatgcaatcaactaaagcttctgtggattcattatttatgaatcaaagccagcttggaagagagtccttccaagcggctcttcatacatctatcgacagcttactggagcaatggcaaaaagacacaggaccatacagcggaatattgcctgggaaattagcggctagtgtcgaatcgttattccgatttcaaccgtctggagaatcaattgaatctgtctttcaagatataaaagaacatcttttgccgcatttgattgatgtatcgcatcctaaatgcttggcacatctgcattgtccgccgctcattcctgcacttgccgcagaggtgatggtgagttcctttaaccaatcaatggattcctttgatcaaagcggtattgcttctttggttgaggaggaaatcctcaagtggctatgtgcaaagttttcttatggcggcttagcagatgggacatttacaagcggtggaacccaatctaactatatggggctgcttctggcgagagatgccttttgtgaaaacacatggcagtggaatgttcagcagaaaggcttaccaagtgaagctcaccgcatgagaattctttgctctaaaaatgctcattttacggtgaaaaaatctgcatcccagctcggtttaggggagcaggctgttgtactggtcgagacggatgagcatcaccgaatggacctcaatgatttgaaaaagaagatggttgaattaaaggatcagaacctgcttccttttgcggtagtagcgacttgcgggacaactgattttggaagtattgacccggttcgagatgtgtatgacatcgtcaaaccagatggtctgtggattcacgcagatgctgcctacggcggagcacttgtattaagcgaaacctaccgaagtaaattagccggtatggagcttgctgattcaatcacgatcgactttcataagcaattttatcagccgatttcttgcggggcatttttgctgaaggataaaagacattttggtttgatcgattatcatgcagattatcttaatccaaaggaagatgaactagatggtattctacatctcgtcaataaatctatccaaacgacgcgccggtttgatgctctgaagttacttctctctcttcgtctaattggagaagaaggatttggtgacatcattgaccataccattcattttgcgaaggatgtggccgcgcttattgagagaaatgatcaccttgaagtaatcaatcctgagccagaaatcaatgcgattgtgttccgatttaaggatgagcaccgaacagatgacatcaataaaatcattcatcgggcattgttcaaaacgggaactgctgtcattgcgaaaacagtggttgatggccgaacatgcttaaaattcactttgttaaatccgagaacgacaatcacacatattgaggaaatcctttctgacatcgttgatatcgggatcgctcatattcaatccgggagggtactacgttgagtcaatataaacaaatggctgaaaatgcaactatgcaaagctttttaaactgttttttacgcgaaacaggaatcgatcgatctgcaaaaaaagagacgagagcagatggctcgcttgtattcatcgcaaaactagcaaagcaagatctagagcttgtgattccgatccgatatgtttcatctgttggccgccatctctttgattttccgattcgcttccgtccgcaaggcagtgaacaagagggcgcaatcgccgattacacgacacttgttgctctatgttcaaaggagcttctcattgaatatggccgcacagatgcagaggatgaattcatgcttcgcatcattttaagctgccgaaatattgaacgattcttaaaggagcgagaaagtgatcgagcagctctttctgaagccgattttgagtatatcgaggctgagcagtcacttcttcttggacatttaacgcatcccactccaaaaagcagacaagggatgacggaggaggaagaagcgttctattctcctgagctgaaaggggctttccagcttcattactttaaagcgcaccattcgattgtgcttcaggattcgtctattgcacagtctgcggcaagcctcatgttagaagagctcttgcgccaggtaccagaagaaacagagagactgaatacgttaacagaaaacggagaatatgtgctcattccgattcacccgctgcaagtcaaagtggtcatggagaaagcgttcgtccagcgttatatagaggaagggaaactgacttatttaggaccgctggggtctgaatacacagcgacttcatcctttagaactgtctatcaaaaagattctgcttacatgctcaaattctctgttcctgtgaaaattacaaactccttacgtgtcaataaacaaaaggaactggatcgcggagttgagatgtctcgcattttaaaaacagaattaggcatttctttatacgataaattctctggattccgggtcattgaagatcctgcctatttatccattcaaggagaagaggcggaatctggctttgaagtagtcattcgtcaaaatccatttttgcatcgtgaaaaaggggcaagcttaattgctggattatgtcaggatcatgcgtatggtggaaaatcgcgattagcagggatcattcatgaccttgcagacgcagaaggtcgatcaacagatgctgtgagccaagattggtttaagcaatatttaaccatttcgttagaaccgatgctctggctgtttgaaacatatggtcttgcactggaagcccatcagcaaaatgctgttgtgcaaatgaaggctggttacccggacaccttctattatcgtgacaaccaaggctactattatagtgaatcgaaaaaggataaactcgcaaaccttgtccaaaacttgagcgtgagaagtgaaaccatttgtgcagatgatgtagccgttgagagactgcgttattatttcttctttaatcatttatttggtctcattaacggctttggcacagaaggactggcaaaggaagaagacttgctggcactcgtgagagacacattgctcgctcatgaggaaacatacggggcatctgaactgacaaacagccttctccgctcaaaggaactgccttcaaaagcgaatttgctaacacggtttgaagatatggatgagctgacaggatctctggaaacacagtctcgttacacagctgtcttgaatccgctctttttacataaggaggcgctgattggatgaggcatcgtattaggtttattcgcgctgaatatgaaagggatgtccggcttgtccacaagtggatgcaagaagagtatgtttacccattttggcatttgaatattccgtttcctgcttttgaaaagcatttttatcaggcgattcatgatccgcatcaaactctttatttaggaacaattgatgggacgccaatgagttattttgaggcatacaacgtcaaaggtgacgtcattgaatcctactatcagccttctccgcatgatcaaggaatccatctattaataggggagccggattatgtgggaaaaggatttgcggccccgctgcttcaggcaatgacagcctttcaatttgagcagaacaaacgaacagaaaaaatcgtcgctgagccggatattcgcaatgaaaaaatgatccatgtatttgaaaaatgcggatttgaacgtgtaaaaccagtcaatttacccgataaaacaggtcttttgatgttttgtgatcgagaacgattcgaaaggaagtataaccatgacgcggttcaacaagcaaaataatgtagtggatgtaattggaatcggcattggtccgtttaacctgggactggccgcattatctgaagaggtaaatgaaatcgacgctttgttttttgaaagaagtgaagcctttcattggcacccaggtatgctcattgaagggacgacactgcaagtcccctttttagcggaccttgtcagcatggcagatgtgaaaaacaaatatagctttcttaactatttgcaggagcaaaaccgtttgtattcattttactttctagaggattttcatatcccgcgcaaggaatatagccattattgccgctgggtcgcagatcagttagactcttgccgatttggcatgaacgtcgaatctgtctcattgattgagaaagcaggagaaaagcgatatgaagtgcatgtccgtcatgtgaatgatcaaaccgtagaggtatttgaaagtaagcatctcgtcttaggaattggtacacagccggcgataccagcatcgctccagccagctttaggagagaaagtttttcactctgctgactatttaaaacgaaagaaagaaggctgttttaaagggaaatctgtgacagttatcggctctggccaaagtgcggcagaagtgttttatgatattttatcagatgatgaggcaaaggatattcactggttcacacgctctaaaggatttttcccaatggaatattcaaaccttggtcttgaatatttctctccagattatattgatttcttttatgagcttccccaaacaaaaaaggatgctttgttaaagcagcaagacttgctgtataaaggcatcagctctgcaatgatccgtgatatttaccatttgctttatgaacgttctgcctgcggagagcagttgaacacagtgcttcaagcaatgacagaggtcaacttgattgaggaaacagcggacggcttgtccctttcatgcatgcaatgggtcaaagaggacacctttacccatgagaccgatattgttgtgctggcgactggctatcaatcggtactgccgccgtttatcaacccaatttctcatcatattcaatgggacgatcaaggacgattccaggtcgaacgtgaatatcgtttaaaaacaaatacaatgggtgaaaatgatatttttgtgcaaaatgctgagcttcatacacatggggttggcgctccggatttagggcttggcgcttaccgaaacagtgtaattatcaatgaacttgctcgtcaaaccgtgtatccactttatcaaaagcacgtcttccagacatttggtacacacaagaacgttaacacatttgaagaaatcaaaggttaaggaggatgaagcgatgagtgtacaagatgaattgaaaaaagcggtgaatcctgctgcttggaaaaaggcaaatcagcgaatggtggcaaaaatgctgtctgaatacatgtatgaggacatgcttcatccagtgcagctagatcgtaaggatggcatcgctcagtatgaattaatcattcacgaacataagaaatatcgctatctcgcaaaacctcgtttgtttgatagttttgatacaatcgctgaatcaatcgagtgctgtcaagacggaaaatggtcaaaggatgtcagtgcgattgtgtttttactagacattcagccgctcattccaatgtcttctgatacaacaggccatcttatcaaagagcttcatcataccctgttagctgatgtacatttgctgtcgaaaaaagcacttcgtgcggatgaactgacagatacagattacgcttggattgaaggagagatgacaggccatccttggattgtgtataacaaaggacgaattgggttcagttacgatgactacctagcctatgcacctgaaaggcaagaaagtgtgcagctgtcttggattgctgttcaccgggaccttgcgacattccatgcggtcgatcatgaaaattatgagcaggtgatcgccaaagaattagatgaagtcacgatccgtcaatttcaccgcgtgttaaaggatgaaggattgaatgcagctgattattatttgatgcctgttcataagtggcagtggacgcatatgattattcagcatttcccggaagatttggccttgcgccggattgtgtatgtaggagagggactggatcaatatatcccgcagcagtccatcagaacctttacaaacatctcaaataaaggcaagcatcatattaaactgccaatgagtattttaaatacactcgtgtaccggggacttccgtcagaacggacagtcattgcccctcgtattacagcgcatattaaagggattgcggatcaagactcatttttatcggatgtctgccgcgtgattttacctggtgagaacgcaagtatcaatgtcgatcatccttactacagcaaactgcctggtgcgccgtatcaatatcttgagatgctcggtgtgatttttagagaaagcatttatacgtatttagatgaaggagagagccctgttacacttgcagcactcacttatgaggatcatgaaggtgagccatatgtgaaacagctgattgaaaaatctggtctctcagcaaaggaatggatggcgaaatttttccatgtggtgatgccgccgctgctgcactttatgtatcaatacggcaccgtcttttcaccgcacggacaaaatacgattcttgtgttaaaagatcatcagccgcatcgtttggcgatcaaagatttcgttgatgatgtgaatattagtgatcagccgctgcctgaattggcttcattagaagaagatttaaaagaagtgctgcggagtgagccgccggaagggttagtgcagtttatctttacaggactgtttatttgtaacctgcgttacgtatcaaatgtgttagacaatcatcaattgttagatgaaacgactctttggcgcttgcttgcagaagaaattcagcattatcaaaaacaattcccgcagctgaaggaccgttttgaactatttgatctattccagccgaagctgacaaagctgtgcttaaatcgtaatcgaatgattgattatgggtacggagatggagatgaccgcccgcatgcgtcagagcatgggaaggtcaaaaatgcactcgctcatgttctttcgtccgcctgtgagaagtaatagaaaagctgtagacatcaactgtctacagcttttattttttacgaaaatgcttgagaggcaaggaaataaagaagtgcgggatcgttctgcttttcttttccgcgaatcatcataaaatgcgctttgtttgttttcgtaaaacctgcttcaacaagtgttgcgtgcaggcgctcagctgtttcctcctgcatatctaaacgaatcgcacccgaataagacgagatgagcgaatggatgagcgaaagagctgtaagttcatcaattgctgcaagcggtccaatcattaaattggcaggcgtttcaacgccaaatgcaaagccagttgtttcgtgatgttcattctttgcaatgatacgccgtgctgcccggttcatccggttttttaaaaagcttgatcgatttgtacctgcgcctttttcatcaagtgcttcaatggacggaaggtgcgtttcatcggcaggagacaggtgaatgtcatctgacacacgaagcgcctctgggttcggtttttgcgctttgtaagtatgaatgtaaccagccgtgtgaaacccgattttttcgtaaacaggccgcccttggacagtagcggttaaaacgacaggaatgctttgatcactttgacctatcagggtgtcaatcattttccgtgcaagacctaatccacgatgtgtctcagatacaatgactgccccaattgacgccaattgatcatattggaaaagtcccgcacatgagatgacttgtccgtccgttgttgaaaaacctgtgaaatatccatttgttaaaagagatgtgagttcttccgcattgtaatcaggccagtctacctctttagacaatgcgatgagatctggtatgtcatcaattgttaatgctcgttgaacaacgtttgtcatgacacgcaactccttcttagctgaattcatttatatgtatcgtaccataagaagcatagtgtaaaaattggtgtttacaatcaaaaaagaacctccaattccggaggccctgcattaatgaacattaaaatatcgagcttcaggatgagaaacgacgattgctgaaacagatgcttcaggttccatcatgaacccttctgtcagatggatgccaattttttcaggctgaagcagcttgaacagcttttcttggtcttcaagatttggacaagcgggataaccaaaggaatagcgctgcccttgatattttgcctgaaatcgtttttccattgtgaaatcgactgggtcagggaagccccatttgtcacgaatcacttggtgggttctttcggctaatccttctgcaagctcaagcgccagagcttggaccgcatgcatttttaaataatctccttcttgcttaaattgctgcgcaacttcacgtatacgcgcaccagctgtgacggcaaataaggcaatataatctttctcgttttcgccgcttttccgcacataatcagaaatagagcggtacggaagcttctcctgtcttgggaattggaacgtttcaatgatgcggtcaggcgctgcgggatcataaatacgcagatcatttccgtttgaactggcagggaaaaattgatacacaaatgccggcgcaaaccagtttttctctctgccttcgtttagaaggtctgtgacaagctgctttaattccaatgcttttggatgctggttagctaacaatgttttgacctttccttttaatccaaggtggtgaccaatgagcatttgttcattcacataaggcataatgtgatgcaaatcgatgtcccgcacataatgacgtgccatagtctctggcgtaaaaataggtgcctgcgggagtgccgcacgtttttctagtaattcaatgacagcttgtggctgctttgcttctttctctttgaaaggtgccacaggctcttctccggactttgtttgaaactgaagaggattcgcttttaactcattggctaaagataagccgtccatggcatcttttgcataaagaaccggtccgtcataatgaggcgaaatcttcattttcgtaaatttccgagaaagtgcagcgccgccgaccaaaatgggcacggaaatattcgctttttgtaaatcctgagcggtgagtaccatttgctgagctgatttcacaagcaatcctgataatccaatcatatctggtttttccttttgcacagcttcgatcaatgtttgaggtgtcaccttgatgccgagatcgaccacttgaaagccattattgctcaaaatgatgtcgacaaggtttttcccgatatcatggacatctccttttacagttgcaagtagaatcttacctttcccgcttgcatgctgcttttccatatattgctcgagatacgatacagatgccttcatgacctctgccgattgaagcacttccgccacaatcagctcgttttgattaaaaagacgtccaacctcagccattccctgcattaacggaccattgatgatatgaagtggtgattcaaattgctctagagcaagggataaatcatcgataagtccttcttttgttccttcgacgacgtagagtgccagcctttcatcaagtgatatggagacctttggttttttctccgttttctttttgcctcggtaaaattgggtgaattcagcaagtgtttgatcatttgtttcatagagcagcgtttcagccagcttgatttcttcctttggaatggaagcgaagcgttcaagcttttccgtattcacaatggcgtagtcaagtcctgcttggacgcagtgatacaagtagacggcattcaagttttctctgccaagaggcgggagtccgaaagacacgttgctgatgcctaaaatcgtcaggcactcaggcagattttccttgatcattttgatgcctttgatcgtttcttcggcagccccaatatactgctcatctccagtgcctactggaaagacaagtggatcaaaaatgatgtcacttgcgggaattccatatttcttcgttaatagatcatgagagcgtacggcaatctcgagctttcgttctgctgttacggccatccctgtttcatcgatcgtgccgacaacaagtgcaccgccgtacagcttcacaagagggagaatttcttcaaaccgttcttcgccatcctcgaggttaatggaattgatgatggctttcccttgggaatacgtgagcgccttttcaatcacgtgtttatctgttgaatcaatgacaaaaggggctttgacttttttcatggcctcttgtaaaaagccttccatgtcagctgcctcgtcacggtctggatcagcgagacacacatcaatcacgtgagcgccgttttttacctgtgcgcgagcaatttctgacgcttcttcaaatttttgttccgcaacgagtcgtttgaacttgcgtgaaccaataacattggtccgttctcctacaaaaagaggacgcattgattcctcatacataaggggctcaattcctgatacggtatgctgagacgattcatgcgcgatgtgacgcggctgaatcgtgcgtacttcatctgacaaagcttgaatatgtgcaggtgttgttccgcagcagccgccaacaatatttaaccagccttccttcgcaaaagcggcgatttttttagcaagagaaacaggggattcgtgatattgaccttcttcatctggaagaccagcatttggatagcagctaaccgctgacttggcgatggaggagagcgtgcggatatggtctgtcataaattcaggaccagtcgcacagttaaggccgacactaattggtttcatatgttcaagagagatataaaaggcttcaatatcctgaccagcaagggtggttcccattggttcaattgtacctgataccatgagtggtaattgaatgcctgcctgctgaaaggcttcctgaatgcctttgaatccagcttttacattcagcatgtcttggcttgtttctaaaagaagggcatcacatttgccatcaatcagggcgcgggcctgctcctcatagttggcaacgagctcaccgaaggttgtgccgcctgtcacagataatgtttttgttgtgggtcccattgcgcctacaacaaatcgaggctgctccggcgtggagtaacggtcagcttcgtcctttgccagctgggcagcccgtacattgagttcataggcaaggtggccaagcccgtattcatcaaggacgagctttgtagccccgaatgtatttgtttcaatgagatcggcacttgcttcaaggtattccctatgaatcgtagagatgatgtgaggggctgttacattcaaatactcgttacagccctcatactcttctccgccaaagtcttctgctgtgagattggcattttgaatcatggtccccattgcaccatcaaggacgaggatgcgtttctttagctgttcagtgatagttgacatggatgtttgactccttttctttctgatgaatgtaggtggtcagttctgctgttaaatctgatcgaaggaaaggggtaattaaataaatgccattaaacaattcacaggctgtatctaataaagagcgggcaatcgctaagccttctgctcgctgcttttccttatcctcgccagccttggccataatgtcacgaatggaatcagataatttgatgcctggaatttcatgatgaataaactctgcatttcggctgcttgttaacggcataatgccaatataaatcggtttatccaaatgacggctctcctcatgaattttcacaagctgttcctcagaataaacaggctgtgaaataaaataatcagcgccgtattcgatttttttctcaagacgtttgaccgctttatcaatgtgacgaacattcgggttaaacgcgccagctactgaaaaattggtctttttaccaagcggcttccctgagaaagaaagaccttcgttaaactgcttgatcagccggatcaaatcaaaggaggttaaatcataaaccgacgttgcacctgggaaatctccaatcttagaaggatcgcctgtaatggctaaaacatcagttaaaccaagggtgtcgagacccatcaaatgggattgaagcccaatcaaattacgatcacggcacgtaatatggacaagtgaacgcatatcaagctgctgtttcaataatgcgccgcaagccacattgctaatgcgcggggtcgcaagagaattatcagctaatgtcaaggcatcaatgcctgcattctttaactcatttgcagcgacgagaaatttttcgaagttcagcttcttcggcggatcaagttctacaataatcgtccgtttttccgcagcgagctcatcaagacctggttcagtccgctgatcttgaatcgaaatgatttcttcttttaatactttcacttctttttcagtgatcggcgctaaatccttgaccgcttcagccattgcgtgaatatgctgaggtgttgttccgcagcagccgccgataatacgtgcgccttgatttctaaactcaagtgcactttttcgaaaataatcgttatctgtatcatagacgagtctgccttcttcaagagagggaagactgctgttaggatagactgacaaatgggaattttctaaaatcggtacgccttcgagtgcctgaatcatatgataagggcctagcctgcagttgatgccgacgacatctgcgccaagagaggacaattcagataaaccatccttgagcggggttccatcctgcaaaacaccttgttcatgcatggagacgttcatgacaatcgggagagtcgtttctttgcgtgcaatttggagaacggccttcgcttcttccatgtcatagtacgtttctagcaataatccgtcaggctgttcatttaatagaatgtacaactgctctctaaagcttcgtttaatttcttcaatagagtaggcatttttgttaaatgttcgaatgccgccgatcgttccgagtacataagcggagcctgcggctgcttttgcgatttgtacggcctttgtattgatgcgcttcgtttcttcctctaagccgtagcgggatagtttaatataattcgcaccgtacgtatttgtttggatgatgtcagcaccagcctgcacatatgcctcatgcacgcgctttacttcctcttctttcgataaatttaattcttcaaagcagcggtcaatgccgtaagagtataaaagtgttcccattgcaccgtcagcaatcagtacgcggttttgtaagtcttgtaataggcccattggtttcctccttatttctatgtaacaaaaaaagccttctgataagaagaagactttttggctgtatcgtaattcttctccttatcttccaagcagttgcttgctggatttagcaccttggtcatagaaaatatatttctactacaccggttgctgaggcttcacagggccagtccctctgcctctcttgataagaaagtgatatgaacatgtcaatgaattgaacttccatcaactgtatcgaaaaaatcggaaataatcaatggaaaatttgaaatttatcgaaaatttataaattgaacgtcaatcggtaaatctgccttgcgcataagagaaataacctcttgtaaatcatctttatttttccctgttacacgcacttggtcatcttgaaactgtgacttcactttgatgccggattgcttaatgagtgcattgatctttttggcgttgtcttgatcaatcccgctgatcagcttcgcgcgctggcgtactgttccgccaagggcatgctcggtttttccgtagtcgatgtttttggtaggaacatctcgtttgatcagctttgtcacaagcacatcttttagctgctccagcttaaagtcatcatcagagatgagaacgagctcttctttttcaagagaaatatcacttttacttcctttaaaatcataacggtttttaatttctttcagcgctgcttgaacagcgttttgcacctctggcagttcaaccttcgatacaatgtcaaatgagctttcttttgccataacacatgacctccatgtatagatattgcgtctattttatcatgcaaataggagaagaagaaactttatcgaagagacgagtcaaagagttcagccggcagcggtataaatcgtgtccagtttgtccactttagctaacagaactagagatgttcatgtgaggagaagtatagtagaataaagtgaatcaaaagatgaacgaacgctcttttatgggcagataggaaggaagagaacatgagaccaggtgagcaactgaccttgcaaatagagaacgagatggaatacggctactttttgacagatggtgaagattcggtcctcttgcaccgcagtgagatgacagaggatattggtgaccgagatgaagtagaggtctacttatatgtagatcatgaagaaagactggctgccacgatgaaaatacctacaatcaatgcgcatacatatggctgggtagaagtcgtagacgtggtagaagacatgggcgcatttgtcgatgtcgggctgtcaaaggatgcacttgttgcaacagaacacctcccgccttttgaggaagcatggccaaaaaaaggagacaaactctactgtatgctgaaagtcacaagctacggcagaatgttcgcaaagccagccactgaagatgtgatcagtgaattgtttactgaggcacctgaaaccttaatgaacaaagaaatcactggaaccatttatcgcttaattgcgacaggctcttttatgctgacagatacaggcgtgcgagggtttatccaccgcacggagcgaaaggaagaaccaagattaggatcgaccgtgacaggacgcgtcattgccgtgaaagaggatggaaccgtgaacgtttctctgcttcctagaaaacaggaagcgttatctgtcgatgcagaagaaatcttaacctatatgagaacgagaaatggtgccatgccttatggggacaaaagtgatccagaagacatccgcgaacgattccaaatgagcaaggcagcctttaaacgagcattaggtcatatgatgaaaaatgacttaatctaccaaaaagagggctggacatacgagaaaaaatgagcagcgtgaaaacaaaccctgacttcaagggttttcatatctcactgaaaagaagaaaaagggataaaatcatcatgattttatccctttttttatatttgttataaataatgggttttttcagtgaaaaaagtcatgaaaaaaagctgaaaaaccttcacttaatcattgaaacaacgcctctcaaatccgataagaaaggagtaaggatgataaaaggagtgtgtgtgtggatgaaagtgaaaatttcattgcttctggtggcagccctgcttatggtgctcgccgcatgcagcaatcagcaagggaaaccaccggcatcaaatgcgaagcatattggcgttatgctcacagatgatggtcttggtgatcaatcatttaatgattcatcatttaaaggattagaaaaagcacgtgatgacctaggggttgaatttgattatagagaaattgcagaaaccgatacatatgaaaaaggactgaccgagctcgtaaaagatggcaatgacctcgtcatcggagtaggcttcagtatgcaagaagatttagaaaaagtcgcaaagaaatatccgaagaagcagttccttctcatcgatgccgtatctgagctgaaaaatgtgacctccgtgacgtttaaagaagagcaaggcagctatttagcgggcgcacttgctgccatgacaacgaaaagtgatgtcattggatttgttggcggtgtcgatgcggatttgatccatcgttttgaaaaagggtttcaaaaaggcgccaaatcagtgaatccgaacatcaagatcttatccacctatgctaatacgtttagtgatgcgggcaaaggcagtaaaatagctaaaggcatgatcaaaaagaaagctgacgttttatatgccgcagctggctatacaggtgtcggtgtattaaaagaagcgcaagcgcagggcaaatatgccattggtgtagatagtgatcagtactacaccgctgaaaaagcggtaatttcgtccatggtaaaaaaagtcgatgaagtggtctatcaattcagcgaacagctcgtcaagaacaatcagatcaaaagtgggcatgttgtctacgacttaagcaatgacggaatcgatatggcaagaattcgggtgctgaagaacgctgagacattgaccaaaaaagtaaatgagctgaagcagaaacttctgaaagaagagggggacgcatcatgagcttacgcatcaaaattttactcaactcactcgtctcacttcttttagcagttggcgtcattgcctttatcattgtcagtatgacaaagatccaatcatcaaatgaaacagaagttcaaaccttattaaacgttcaaaaaacaaaagcaagctttgaaagtgttgaacaagccatgaccaattactccatgacactttctgatgaacagctagaagtagttcaaaccgatatttctacagcaaaaaaacagctgcaaacgttaaacaaacatgcaggtaatatcaacaaagatgcactaacaaggttaaatacaaaatatgatacgtggaccaaggaagcgaatggtgccattggtgaaaaaaatgcatcagatgcaagacgggtcgctgcaagaattgatggtgttttaaacgacgtccatacaatgaataaaagagcagaagaagcgtataaacaaaatctagagaatacatctgataacgtgcaatggatcatcaccagtgcactcgttgcagccctcacactaattgtcattgctgtctttttaaatattgggttaacaagatccatcgtgacccctatcaaatcactatcctaccgagcgaagcagatcgcagaaggcaaccttgctgtcgaacggatggacattcagcgcaaggatgaaatcggcggcttgaatgaatcctttaatcaaatgacagatcagctgattagtctgattaaagaaatcagcaatgtctcaagtcaagtagagacattctcgatccagttagatgatgaaaacaaaaagctgatggaatctgcaaatcaagtatctgtctcgacagacgaaatggcaaatgggtcacaagccatttcagaggatctccagcatggcgtcagtttgattgaaaagatggatcagcatggacgtaaaaattccgaacgttcacaaacagtcatccaaagtactgaggatgccatagaagcagtggaaagtggaaagcacacgttaacagaaacaaaaactgcgattgaaaaaaatacacatgccacaaggcaaatcgagcagtcagcaggagaattcacgcaatacgccagcggcatctcggccatggccaaaactgtttctgacattgcggatcagacaaacttactttcgctaaatgcggcgattgaagcggcaagagcaggtgaagctggaaaaggctttgctgttgttgcagatgaaattcgtaagcttgccgatgaatcatctaacgctacaagacaaatctttgatatggtcagtcatattgaaagaggcattcaatccattagtcaaactgtcaaagaaggagtcaagctttcacttcaacagcaggatgcgatggacaaaacctcacactcctttgaagatatagaaacaaaagcgcagcacattaaacaagaaatggctgtcttaaatgaccaaattgttcaatcaacagagcttggcggacaagtgctgaactcgattgaaaatattagtgcggttgtagaagaaacagcagctggcagcgaagaaatttctgcctctgccaatgaacagctgcaatcattccatcaaatgaacaaacaggtagaagaactgatgagtatgacggcaaggttaaatgaaaccgtccatcggtttaaactttcataagtcataagaaaagcacccttcccgtgatgtgtcagggaagggtgctttttatgagggtttgcctgtaaagaagatggcaagcgtgcctgggcctgaatgggacccaacagccgcgccgacaatctgaatatcaatttcttttggatgaaattcggcttcaatcaattgtctcatgtcttctgcaagtgcaggatcatcaccatgactaatgcccacagtttgatttggccaatccgttccacgttctttcatcagttcaataatgcgtttcaacagctttttacgtccgcggattttctcaagtggtatgagctttccatcctcgacgtgtaaaatgggcttaatgcttaataaaccgccaacaaatgcggacgctttactgattcttccgcctcttgctaaatacgataaatcgtctacagtaaaaatatgttgtaaagattcgcaaaaatgctttacagacgtttcaatttcttgtattgtatttccgtcaatggcaagtgattgagcgtgtttgacagcaagcccatagccgagtgaagcacatttagaatcaatgattcgcaaatcaaaatcagggtattcttccttcacttcgtttgccatcatcacagctgtttggtatgtaccggaaagctctgatgaaaaggcaacatagattgcagatgtatgggtttgtgcgacagaaacaaaggcttctttgattcggtttggtgaagcttgtgacgtttttgggctggcaccttgtctcatcgcatcaaatacttgttttggttcaatggtgatcaaatcttcaaattcctgctcgccaagtaacacacgcagcggaatgagcgtcatgttatgttcatcataataagaaagaggcagatcagcagcactgtctgctatgatatgaacagtcatcaaaatcccttctttctaaaaatatcagccatattttacatctttttagcctaactatatcacagaaatcatcttttcgtgttcaaattctaaattttagggaaaaccatagagagaatggtaagtggaggaatgacaatatgttcattggagaagcaaaaaaactcattgtcgtcgtcattggtgcactgctcaatgcgattggactgaacttattcttaatcccagctgatgtatacgcgagcgggtttacaggggtagcccagctgttatccagcttaatggatcaatatgcgccattttatatatcaacagggatcctattatttattttaaatattccagtcggcattttaggctggatgaaagttggccgttcctttacgttatacagcatcatcagtgttgcactgacgaccattttcctcggcatcttaccagaaacgagtgtttcacaggatatattactaaatgctgtgtttggcggcgtcatatctgcactcgggattgggatcaccctcaaatacggggcatcaacaggagggctcgacatccttgccatgatcttagcgaagtggaaggataaaccagtcggcacatatttcttcattttaaatggaatcatcatctttacagcaggattattacaaggttgggagaaagcattatatacccttgtcacattatatgtgaccacaagggtcattgatgccatccatacaagacatgagaagctgaccgcgatgattgtgacgaagaaagctgatgaaatcaaagaagccatttatggaaaaatggtcaggggcattacgactgtacctgcaaaaggagcttttaccaacgagcaaaaagaaatgatggtgatcgtcattacaaggtatgagctgtatgaacttgaacaaattattaaagaagtcgatccaaaagcctttacaaatattgtgcaaacaaccaatattcttggatttttcagacgagattaaaaggtgggtagcaaatgaaaaaagggttggtgcttcttctcgttttattgattttagccgcttgtggacaacaaaaaaaggatgaaccagacaaggaggtatccggtcaaatgggagaaaaaacggttgtactcacagtagaccccgtccagaaaggttcttcggttcaatttaacatgtcgctgaaaaatgaatcagatcgagatattgaatttacttttaacacaagccagaaattcgaactcagtgtgtatgacgaaaacggaaatgaacaataccgctattcgaaagaccgtatgttcacacaggccatccaatcttttgtactgaagaaaggcgaagcctatgattttcaagatacgtggtcaaacggtgtcaagccgggaatgtatgaagcggtcgtcacatttaaaggaaaagcagaagggctgaagcaaatcacggaaaagaaaacgttccaagtgaaataagtgcttcctgcttcatgagaatcagaaaaagctgtccaatggtggacagctttttttatgttagagatcatcgagcaagtcttggaaggtatgcagctggtttctttctgcatctgtcgaattggcaaatgcagaagatacggcatttttggctcgtttgaccgcctgttgacgctctaacccagatgaaaatgaagaagtaagggcttcttcagtaaatgatttggcttgatcaaaaagttcgtttctcacaatgaacctccagaagcatcagtcttcatatttcccctgtccgccgccgcttcttcaagtgtcgaacgataaggaaaacgtgcgtcatgcagactgactgaatctttaccttgttgtataaagcgtttcgatttgcttcttttacccattcggaatccgcccctttacacaagctgacaggacaacctgtctaacggtagtatgcccgcttccttcggttatgtatgaatggaaaaattaaagcgagaagtaattcgttagaaactttgcaatcccatcttgttcgttcgtatcagtgacttcatttgaaacacgtttcaccgcatcgattccattgcccattgccactccgcatccagcaaattcaagcatttctaaatcattgtcttcatctccgaatgccacaatccgctcctgtggaacgccgtaataatcactgatcttttgcagtccaacggccttgttcatgcctgttttaatgatttcaatcacgtgccacggagcagcccaccgccggtgatcaatcacttctgcatgaacatctgataaatagcttcgaatggctccaacgtcctcttcttttgcatggattaacacgctcgtcacattttctccaaggttgtcccgaaggtctcccacggtgactttatttgcattcatattaaatatatcaatgagcttctcatcatggtaatggaaatacaaatcgtctaacacttcagctagcacattgtgcactttatactcctcactaatgtctacaagctgtttaacgacttggagatcaagtgacgtatgaaatctgccccatttttcatcaagaggatgatggacaaacgctccattaaaattcacaatgggtgaatcaagctgtaattgctgataataaggagagctggaacgaaatggccggccggttgaaatacagacatgatgcccgctgtctttcactttttgaatgacgtcaagcgtgtgtgtagagatggttttatcatcttttaataacgtgccatccaggtcaagtgcgattagataaggtttagtctccataaaatctcctttgatctgtaagtgataggaggcagttcgtgcggcgcctctacctatagtgtatctttatcacatctttgttgtctacatgttaaaataaacaaagacgggaatgataaaggaggattcataggctgtgatcaccattgatgagcaaactgaacacgatattccatttttacatatcgtaaaagctgaaaataaagacaaaccgcttccgcttgtatttttcatacacggatttacaagtgcacgtgagcacaacttacacttcgcctttcatttggcggaaaaaggcatgagagtgattttgcctgactgtgcttatcatggtgtaagatcagaaaacctcagcttagaggaactggcatcaaagttctgggaaattgtcctgaacgaaatacgtgaaatcgatatactcaaaacatactttcaagaaaaacaattgattgaagccgatctgataggtgttgcgggtacttccatgggcggcatcaccacctttggtgcactggccaagcatgattggattaaagcagcagtcagcttgatgggcagtccgaaatatacgacgtttctacaagcacaaatcatggatatgcggcacaaagggttgatgaaagatattacagatgaagaggttcatcagcaattagacgccctgcgcctttatgatttaacgctgcaaacggatcgattaaacaaaagaccactgttattctggcatgcagaaaacgatccagttgtcccttaccggcatgcaaaggctctttatgacgagttagcagcaacccaatataaagaagacccgcacctgattcgttttatcacagacggacaagctggccataaggtctcaagacaagcaatgtttgaaacgattgactggtttgtgacacatctgaaaagcacaaacgtttagtcaaaggaaaaagtacgttatactaatggaaaaggagtggatatcatggatgaagcattgaaagaaaatattttaggcgccctagaacaggtgattgaccctgagctaaatgtcgacatcgtcaaccttggacttgtctatgatgtcgatcttgatgagaatggaaaagcggatatcacgatgaccttaacatcaatggggtgtccccttgcaccagttatcgtggatgaagtgaaaaaagcattaagtgatcttccagaagtgaaagaaacagaagttcacatcgtatggaatccgccttggacacgagacaaaatgtcaagatacgcaaaaattgcgctcggtattcaataagcaaaaatgaaaatgcctggtatgagttgaactcatgccaggttttttttatgaaaaaataaggtggaggaagagaacgtattgatataatgggtgtaatataacagatcggagcctcataatgaaacgaaaatggttatggattgttcttttagtgggatacgctgctgcattttttgcatcaatcaccattcgtgaggagcaagcacacaaaagccaagatcttgaagcctttacagatgtcagtcatcttatgcctgtcaaaataaaaaaagtcgttcaaggaaaagaaatagacactttaaaagaagtattaaaagaagcgaaagcaaaaaacctgccgatatccattgcagggaaacagcatagcatgggtggccacacgtattatgaaaatggcatcgtgcttgatatgaccaaattccgtcagattttagcatttgatgaaaaaaagaaaaccatccgtgtccaaagcggcgctacatgggatgatatacaaacatatgtgaacccctacggtcttgccgtgaaggtcatgcaatcacagaatatctttacaattggcggttctctcagtgcaaacgcacatggacgtgacattcggtacggatcactcattgacacggttcgttcctttaggctgctaaaggcagatggggagatcgttacagtgaagccaggcgatgatttgtttacagccgtgattggcggatatggtttgttcggcgtgattttagatgttgagctttcgctaacgagagatgaattatacaaaatggagacaacctctcttgattatcgtgaatacaccgattattttcaaaagcatgtcaaacacaataaagaagtacgcatgcatctcgcaagaatctcaacagcgaaaacaaactttttgaaggagatgtatgtaacgaactattccctctcaactcatcaagagctcgaaccataccgagagctaaaggaagatcagctcgtcatgccattgaaatttatgctcggcctttcaagaagatttgatatggggaaagatctgctctggaatttgcaaaaaaagtatttccaaagtcaaaatgatcagctgatcacaagaaacaatgtgatgcgttcagattctgcttttttagaatatgaaaatgagtcagacacagatgtgcttcaggaatatttcgtcccagttgaccgctttcgtgcgtatatcgatgaaatgagagactttttacaacaggaagaattgaatttaatgaacatcacgatacgctacgtacaaaaaaatgaaaaagcggatctctcatatgcgaaagaagatatgtttgcccttgttcttttagtgaattgtggttttgagaaagaagagaaggcagaagcagagcggatcatccggcaaatgacagatatcacgctgcggcaccatggaagctattacttaccgtacatgccttatcaaacgaaggcacaaatgaagcgggcgtatcctaaaaccgatgtattcttccaaaagaaaaagcaagcagatccagatggcaggtttatcaattacttttatgaaaggtacaatacacaatgaatgcaaaagcaatgaaatggttcgtctactcacaaagcctgctgtttttcgccagcagtttgattttccctttttacattctttttattaaaaatgttggttcaagctattcacagtttggtcttgcctatggcctctttggtttaagcggagcgtttattcatttactcttagggaaactacccgaaactactgacaggcgtctctttttaatcattcattcgttcggtatggcgtttcttttactgctatttccgcatataacagaagtggagcaagtgtatatgattcagcttgcacttggtgcgttaggcggctttcaaaaacacggggagaaactgctcgtcacggaactgacaacaggtaataaaagaatgaaggaggttggccactatcatttttggacagctcttttttcatccatcgcgattatgcttggcggtctgtttgctgatttctttaccgttcatttcattttttatgcaagctccatattatatttatgcagtgcgctcatggtcatcatgatgaaatacgaaagataaatccgcatgtttcgagaaagagatgcgagttattgtatagcgtataaaaaagatacagattaacctctgtgtctttttttatatcgaatcgtttgttgtaccttaatccaatgggaaggaagttgtatatgtgaggataaggttgtgttaccacttcctttagccgaattccattatccaactatttaaaatatccataaatatgaatatatagtataatatagatggcagtgatttggaggatgtatccaagtagctatcatttaaaaagtgcttaacagcttactcccaatagctagagaaaaaatctatgggaggaatgtttaatgatgtcgcaaaaaagttttttgggactaatgctttttgtagtagtcctgcttattgctcactttaccggttttataatatttgactggataaagctaaacgaattcgcattaccaattctatgcctcttaggcagttggatcttagcaaagtttgataacagtggtagcacaccttgatagtgggctacctatcataactgttacacccaaagagaagggggggatgaacatgatagatttttgtaagtttagttagacattaattctatatgaaataacttaataggtaaatttaaataatataattgggaaagttatgattatgtagggtttgaagtatattttattttgttaaaatgtatagaatgaaaatatggtaaacagacagtaaacattcctccaacaatagatgggttgtcgttatccggcaacccttttctctaataaacagatttcataacttaaaatgaaatatgaaagataaatccgcatgtctcatgaagatatgcggattttttgttgaaaaaaaatgaaaacaaatattaaatatacaattgaattaatttttatacatgttataatgttaaataatttcacaaagatcaagagggtgtattgacgttgaaaataggtattataggtgctacagggtacggtggtgcggaattggttcgtatcttcaagcatcatccacatgtggaggaatgtatattgtattcatcaagtggtgatgggcaattatacagtcaatcttatccgcatctgacaactattactgatcaaacattaaaagccattgatccagcttccattgtgcgagaaacagatgctgtgtttttagcgacaccagcaggcgtatcaagtgaactttcgccgaagctcatgaatcaaggagtgcccattattgatttatcaggtgatttgcgcattcaagatggcgcaacctatgaagcttggtataaacgaagggcagctgatcaagcatctgttcaacaagctgtgtacggattatctgaattaaatcgtgtaacaattgagcaggctgaagttattgcaaacccagggtgctttcctaccgcagttcttctcggtttagcaccgctgatgaaacagaatctaatcgatgaatctatgatcataatagatgcaaaaacaggcgtgtccggtgcaggacgatctgcctcacttggaacacatttttcagagctaaacgacaatttcaaaatttataaggtaaatgaacatcaacatacacctgaaatagagcaaatattaagagaatggaatccgcaaacggcgaacatcacattttcaacgcatcttgtcccgatgacaagggggattatggcgacgatgtatacacagctgaaatcagttatcacaaaagaggaattgatgaagcatatgaaagacttttatgaagattcctattttgtcagagtgagaaatcacggcgtgtatccgcaaacaagggaagtctacggcagtaatttctgtgacattggctttcatttagatgaacgtacaggcagactcacgattgtgtctgtgatcgacaatctcatgaaaggcgcagccggccaagcggttcaaaacttcaacatcatcaaaggcttagatgaagaggcgggcctcacaatgacacctctctatccataagaacaggggagacaacaaacatgatcgaattgaatgaaaaaggcattgtaaaaatagacggtgacgtatcatcaccaaaaggctttgaagcaaaggggattcatattggattacgctattcaaaaaaagaccttggactgattgtcagtgaggtgccggcagcgagtgcagcggtatatacacaaagtcactttcaagctgcacctctacaagtcactcacaaaagcttaaaaaagacagggcaattaaaaggtgtcattgtcaatagtgccatcgccaatgcatgtactggtgagcaaggtttgaaggacgcatacgaaatgcaggcagcctgcgcagatatgttaggggtagaacctgattacattgctgtttcttctactggtgtcattggagagtgtctcgatatggataaagtcaaaaaaggcatctcgcagctgaaagaagcaaaagcaggaaatggtcattttgaagaggcaatcttaacaacagatacagtcattaaaaatacaacatacaccctgacgataaacggcaaagagattctgattgcaggtgcagcaaagggctctggcatgattcatccgaacatggcaacgatgcttggcttcgtgacaacggatgcaaatgtcgaacaggaagccctgcaaaacgcacttcgtgacattaccgatgtgacctttaatcaaattaccgtcgatggggaaacatcgacaaacgatatggtactcgtaatggcaaatggcatggcagaaaatgaagcactcaatgaaaagcatccagaatggccattgttcaaagaaggattaaagctagcttgtgaggatcttgccaaagagattgcaagagacggagaaggtgcaacgaaattaattgaagcgcaagttgctggcgccaaaaataatttagaagccggcatcatagcgaagaaaatcgttggttcaagtcttgtgaaaacagccgtctacggcaccgacgccaactgggggcgaatcgttggagccattggtcatagtgcagcttccgtcacaccacaagaggtagaagtttatttaggcggacaatgtctgtttaaacataatgaaccgcagccattctcagaagaggaagcaaaagcgtatctagagcaggatgagatcacgattttgattcaaatgaatgagggaaatggtaaagcagcagcatggggctgtgaccttacctatgattatgtgaaaattaacgcgagctatcgcacataatgaaggagatagacatggataaaacgatcgtatttaagtgtggaggcagtgtcattcgagaactttcagataccttttatgaaaatgtccgctcacttcaagctgctggatttaagctggctatcgtccatggtggaggtcctgaaatcactagcatgctgcaaaaattagaagtgaaaacagaatttgttgacgggcagcgcaaaacaacgaagcctgtgttagaggtagccgaaatggtcctctcgggaacggtcaataaatactttgtgtcagagctcgcaaagcatgatatctcatctgtcggcgtgtctgggaaagatgggcagatgcttgtcgcggatttcctcgatcaagacgtgtacggatacgttggtgaaatcaaagaagtccatccagagatggcagaagcattaatggaaaaacaatttattcctgtgattgcaccgctgtctatgacagaagaatgccaaacgttaaacgtaaacgctgatttagcagcatcagctgtcgcaggagccatgaaagctgataagctcatgtttgtcacagatgtggaaggcattttaaaaaatggtgagcttttagatgtcgtcaccgaacaagaagccctttcactcattgatgaaggcattatttccgggggaatgattccaaaagtgcaatccgctttgagtgctttatcaggagatgtggatgaagtcatgatcgtgaatggcaaaggcagtatctttacaggggaaacctttaaaggaacaagaattgtgaaacaaaaggaggcggtcctgtgagtcatctctttcaaacgtatggacggtggaatgttgaaattaaagaggcagcaggttcttgggcagtcgatacaaatggaaaaaaatacttagactttatacaaggcattgcggttacaaatctaggccacaatcacccaaaggtcaatcaagccatcaagaagcagcttgatcacgtctggcatgtatcgaatctatttgaaaatggactgcaggaaaaagcagcagaaaagcttgcggcaaacagttcaggagacctcgtgtttttctgcaatagcggagctgaggcaaatgaaggtgcgatcaaattagcgcgtaaagcaacagggaaaacaaatatcgtgacatttttgcactcttttcatgggcgcacgtatgctggtatggctgctacaggtcaagataaaattaaaactggctttggccctatgctggaaggctttcattatgtaccgtttaatgacccagacgctattgccgcgtgtgaagtcgatgatgtggcagcggtgatgcttgaggttgtgcaaggagaaggtggagtaaatccagcgacagcagaatttctagaagccgttcaagcgttttgccaaaagcatgaagcactgctgatcgtagacgaaattcaaacgggtattggacgtacaggaacagcgtttgcatacgaacaaacgggacttgatcctgatattatctcttctgctaaaggcttaggaaacggcttcccagtcggtgcggtcatagggaaaaaggctttaggagatgcattctcaccaggttcacacggaacaacctttggtggcaacatgcttgccatggccgcagtgaatgcaacactcgatgtcattttcaaagaagagtttctttcagaagtcaaagaaaaaggcgcttatctgttagaaaagctgcaagatctgaaacaactgaatattgtaaaagaagtacgcggaaaaggattgatggcagggattgaatgtcatcagccagtcggtgattatatcacagctcttagagaacaagggttgctggtacttccagctggtccaaatgtgattcggttattacctccgctgaatgtagaaaaagcagaaatagatcatgcaatagaagcgattactcaggttttagcaaatgaagcagtgacggtataaatttttttacaccaaaacgcataaaaatgcatttatattactaattattcaatttggggtgacacaagcatgaaaggttatttaaatttagaagatggagcctcttttgaaggagatctgacaggagaagctggcatgacaggtgaagtggttttctttacagggatgacaggttaccaagaggtgctcacagatccttcttataagggacaaatcattgttttcacatatccactcatcggaaattacggtattaatcatgaagactttgagagcaaaaaaccacaagtgaaagctgtcgttgtgtatgaagcagctgatcatttctctcatcatcttgcagcggttagcttaaaagattatttacagaagtggaacattccgcttctgacacatacagatacacgtgcagtcgtgcaaaacatccgggctaatgggacgatgaacgctgtgatcagtgtagacgaaaacgaaacaccgccggtcatgaaacaagacaatgtggtcgcacaggtgacagaggacgagatctacacacaaggcagcggcgaggaacatgtagcgctcattgattttggctttaaaaaatcaattgcagattcgcttgaagcgcgcggctgtaaagtaaccgtcattccgtacaaacagctggaaaaggtgtttgagatcaagccagatgcgattctgctgtcaaatggacctggtgatcccaaaacaatgaagccatatttaaaaatcattcatgacatcatgatgaccttcccgacacttggaatctgcttaggtcatcaattaatcgctctcgcacttggcggggatacgtataagcttccatttggccaccgcggggcgaatcaccctgtacaagatacagaatcccaacgtgttttcatgacaagtcagaatcacagctatgtggtgaatgaaaaaagcatgaatgacaaagaagtggacgtgaaattccttcatgtcaatgatggatctgtagaaggtttcattcataaagagaagctaattatgtcagttcaatttcatccagaagcacacccaggtcctgctgaaagtgaatgggtattcgatgattttattgagaaagtgaaacaagcaaggagagaagttgcacatgcctaaagatcaaagcatacaaaccattctagtcatcgggtctggtccaatcatcattggtcaggcagcagaatttgattactcaggaacacaaggatgtatggccttaaaagaagagggctacaaagtcattttagtgaataacaacccagcaaccattatgacagacgaatcatttgctgatgaaatctattttgaaccgctttcagttgattcagtgacaagaatcatcgaaaaggaaaaaccagatggtcttttagccaaccttggcggacagaccgctttaaaccttgctgtcgagctagaaaaagccggtgtgctgaagaagcatggggtaaccctgctcggaacgtcagttgaaacaattgaaaacggtgaagatcgagagaaattccgtgctctcatgaagcagttgaacgaacctgtgccagatagtgaaattgtggataatgcgaaagatgcccttcaatttgcaaaagaagtaggcttcccagtcatcctaagaccagcatacacacttggcggaaagggcggcggaattgctttaacagaagaagcgtttaaaccgctcattgaaggagcccttttagcgagcccgattcatcagtgtttagttgaaaaaagcatcgctggctttaaagaagtcgaatatgaggtcatgagagaccgtcaaaatacgtgtattacggtttgtaatatggaaaatatcgatccagttggtgtgcatacaggagactcgattgtcgttgcaccttcccaaacattaacagaccaggattatcaaatgcttcgttcagcgagcctgaaaatcatttcagcactggatgtagtcggcggatgcaacatccaattcgcccttgatccactcagtaaagaatactttgtcattgaggtgaatccacgggtcagccgttcatctgctcttgcctctaaagcaacaggctatccaattgctaaaatggcggcaaagcttgcggtaggctacacgctagacgaactcaaaaacccgctcacaggcacaacttatgctagtttcgagccggcactcgattatgtcgtcgtgaaattcccgcgctggccgtttgataaatttaaacaggcagaccgtcaattaggcacaaaaatgaaggccactggcgaagtcatggcgattgaccgaaatttagaatcagccatccaaaaagcagttgcatcacttgaaattaaaacgaagggcttccacctgccagaactgaaagagcaatcgacagaacaattatttgaactcatcaaaacaccagacgatcgccggtttttcgctgttatggagcttctttcaagacaagaaacggttgaaacgattcatcaaacgacgaaaatcgatcgattcttcttacatgtgtttaagaatatgatcacgctcgaacaagaattgaaagatcataaggggacgctatcaaaagataccttgaaaaaggtaaaggaaaagggtttccttgatgaaacgattgctcttcttacgggtcacacggaagagtcaatcaggcagctccgtcaagaatacggtattgctgcttcatttaaaattgtcgacacatgtgcggcggaatttgatgcaaaaacgaattacttctattccacttactttggcaaaagcgatggtgagcatcaagaaaaaacaaagcaacgtgcactcatcattggctctggtccgattcgaattgggcagggagtcgagtttgactatagtgcagttcatggcgttcttaccctgcaaaagcttggctttgaaaccatcatgatgaacaacaatccagagacggtcagtacggattatgagatcgcagatcgtttatattttgaacccattacattagagcacatcttaaacgttgtcgaagcagaaaaaattgatttcgtcatcgtccaatttggcggacagactgccatcaatgtagcagaaggcttagaaaaagccggtgtcacgttgttaggtacatcctttgacacgctagatgcgctcgaagatcgtgatttgttctatcagcttcttgatgaactgaatcttcctcatgcagaaggaaatactgctgactcaaaagaagaagcactcgcacatgccagaatcattggttaccctgtgttaattcgcccatcgtatgtcattggcggaatggggatgatcgttgtccagtcagaagcacatttgacatcattgcttgatcagccagatcatttgccgtacccgatcttaattgatgagtatgtcactggaaaagaagttgaagtggatctgatttctgacggaaaaacgaccttcattccaacgatcgtggagcatatagagaaagcgggcgtccattcaggtgacagctttgccattttaccaagtgtctccatcagcgaagacatcaaacagcaggtgcatactgcgtccgaacaaatagcgaagaaattagcgtttaagggcattatgaatatccaatttgtgatcaaaggggatcaggcgcttgtactagaggtaaatccgcgggcaagccggacggttccagtcgtcagcaaagtaatgggcattgacatgattccgcttgcgactcaattattagcgggtgcgacgcttgaagaactgaaccctgcaacgaaaaacaaagggggaacagcggtcaaattcccagtcttctcatcacatgccattcaagatattgacttaaagctgacacctgaaatgaaagcgacaggagaaggaatgtgtgtaggcaagaacgccgaaagcgccttgaaaaaagtgtttgcgtcaatctggcatcagaaaggcagcctctttataaaaggcagtgaacaattggtagataaagcgaaacatgcaggctttgacgtctggacggacagctttgaaacttggctgcaaaacgaagataagtcgcttcatatccatttaggggaagatgaagaggcaaaagagcagcgtgtaaaagcactcacacatggcgtccaagttctaaccgaagatgaaacagctcaagcattcctgcaagggaaaaatggagatgtatcaccagtatcgctcaaagaattatataaaaaggaagtgacggcatgagtcaagtcgacgtgcaaccggcattatacggaaaagactttttatcgttaaaagatttctcaatcaatgacattgcttatttaattgaaaaagcggaagaaatgaaacaaaatccctatcaggatttattcaaagggaaaacgttagcgatgatctttgaaaaatcgtcaactagaacccgtgtatcgtttgaagcgggaatgacgcagctaggaggacatgcgctcttcctcagctcaaatgatttgcaaattggcagaggagaaacgatcagtgatacggcacaagtgctgtctggctatgtagatggcattatgattcggacctttgaacatgagaaggtcgaggagctagcacaaaacgcgtctattcctgtcatcaatggactgactgactactcccatccatgtcaggcacttgctgatttattgacaatcaaagaagtaaaaggaacattaaaaggaatcaaagtagcctatattggtgacggaaataacgtggctcactccttgatggttggctgtgcgcagctaggctgtgacattgctgttgcatcaccagaaggctatgaaccgctccaagaagtaacagacacggcacgtgagtttgcaaaacaatcaggcgcagaagtcatcgttacgacagaccctgtcgctgctgttcaagatgcagatgtcatttattccgatgtgtttacaagcatggggcaggaagaagaaacagagaaacgtcttgctgaatttaaagaatatcaagtcaatgacgaactaatgagttatgcagcaaaggattatattttccttcattgtctcccggcacaccgcggagaagaagtgacagcagacattattgacgggccgcactcaaaagtttttcagcaggcagaaaaccgtttgcatgtacaaaaagcgttaatcaaagagctcatgtatcaacaaaccaattaaatgaaaagtgtccctgactcgtaggagcagggactttttgcataaaggattggagaggcaagtgacgggacataataacatcatcgagaaaggaggatgggaatgggtcagaagcatcaatttaaatcagggaataaagcaccgaataatggtgtgtatatcgagatcggtgaaaccggcagtatggtgaaagatcctttaaagattaagcttcaagcaggcgacgtctttccggataactcgaaccataatcgtgtttggacctaccaaagaaagccataagcaattgactaagagtcagaaggaataagtctttagaggcatgtgtcatgcctcttttttctttataataaaaatcaattaagttccaattttcaaaaaacagtataaaaaaaagaaaatttaaggtaaaatatgtaattggaatatattgttgaaaggatttgtgtgatggaaaagacgaatctcagtgaaagtgtttggaataaacgcttcacctcattattcatatcaagactgattaaaaacacaggagaaagttttgcttttacatccgtcctttggctattgattttgagaggggatggagcactcggtacaggacttctcctagcagtaaccgttcttccttcatctttgttagccccaatactaggacctcttatgaaaaagcaccatttgtctaaatggatgttcgcttcagacgtcgttcgagcaacaattgtactcattattccgcttctgcatttttcgcatctattgcctttatggttattgatctcattaatggttattcaatcggcaacaggtgcagcatataatccagcctctgtggccattttaccgcagattgttccgaagcatctgattcaaaaagcaaatgccatcctgcaatcttcttttgagattgtcgcacttgcagcagtcatggtggctggtctcttggtcaaattaatcggacctgcagataccctgctcatcaccactgccttattcatcatatccggcctgtttattatcggcgtcaaactaaagaaaaccgatgaagaaaaagcagcaggcattaaacaagcaaagaatacatatttgtataacttaaaaagaggttttctcgtcgtcaaaaatcatcacattttatttgcactgacgctgtattgtattttaatgaatgtcgccgcagcaccgtggcaggcactatctgctgtatacgtagcagaagcactgcaaagcgattccatggtgtattccattttaagaggtgttgccgcagtcggcgcgtttatgatgggctttgctctagcgaaagtgaaaattaagagatttggtttgttctttattgtcgctggtatgattgaaggagctgcgttctttatcacagggatgagtacatggctgccggtcgttctacttgcatcctttatattcggtgccgccgttagtgcgatcaatgtaccggaaatggtcattattcaaacgtctgtcgaccaagacgatcagccgcaagtatacgccgtgatcaatgcttcatcaaatgtttttctcccgcttgcagctgtcgtatcaggtgttctggcagaaaggtttggagcaggacctgtcattgctggcggtggggtccttgaaattttatctggtatcgcgatcttcctgtttacagggcttgcgaaaagccatttgacagcagacaaacagaagtccgaaaccgtcgaggtgtaatcgataaaaaaaccccctgtggctgcagggggttttagcgtaccgcttttcaatcaaaaagaaaaagagctaaaatcaacatcattttagctcttcctcagcaatcaagtcttacgtattaagagtgttttgttgaactttccgtttctttcattggacttacttcagcaaagatgaataaaataaccgtaaacaccactgcaagaatagaagtcaaagtaaagtcataagcagcgccattcatcgaggcaacgatgtaaccagccatatgtgtcagcagaaaagtccaaatgagggtgataatataatgcataatcccaccgtcctttatgtaacaatctattgattatcataccatagatacgagtgaggggaaaagactgttttagcctttatgtgaccattttaagaccttctgctataaaaataaaaagaattcttctctctttaggggatttccttattcctacaagagttgttgttcatatcatagaaagcagaatcactgaaaggaggctggccatatgggtgtaagcgaacggtttttccagcttggttcccagtggaacgtcattcaccttcctcaaaaaccaaatggctttggcattcttatcctcggtgaccgaaatcactttgtgcaggaaaatacatcattctggcttcagcactatggaagaaaccagcttttaactgccttaaaggatgaaggatatacattgtttaatagtcatcttcatgggaatcactggggatgcgaagatgctgtttttagtgcaaagcagctcgttcatcacacattaaaacaagaaatattaaaccgggaaattcatgtgctggcagaggggatgggcgcactcgttgccatgagccttgctgaagagatgccagaagtgctaaggtccattgcgcttgtgaatccatgtctgcatctctatgcacaacgagaaagagaaaaggaacacaaattcttttataaacagctgatcaaagaattagcgaaaagctacggctgctctgaaaaggaagcggaaacgtacccgctccctgcttgccctgttcattctgctcatgtaccgattcacatatggcaaagactaaacggcgcaccgtatgcatatgaactgcatgcaaagccttttatagatcagcatatgaagaatccagagcattgtcagatcgatctcaccttgcatatgtttgatcatccgagaagaatctttcaatccattcacaagttttataaatcgcatgaaagagaattgtgatgaataggatgataacagcccttcatggaaagggctcttctttttattcgataagctaaaaaaggggacatgaacatggaaacaggactgatcataggggcagatgaattttttggtctagcgctgtgtgaatatatgatgaaagagggcattcaagtggatatcacatgtcctcatgatcatacagaagagcaaaagatgttattagaagagcgaatgatgtggctcggcagaaatgatctcttccgtgtcattgaccttcaggatggaaaagacacgtatgacctcatctttattcaatcagaggaatcagataaacgacacaaagacatgaaagcgaagcatggcatgtaccgggttctttacgaaaaaaccgaagaagaatcgtccaatcagaatgtgccggctgttattctccctcgcatgttcggaccatgggcacttaataaagaaagaactaagcgtgatgaagcattttttgtagaagatgtggcaagggatttgttcaagtgggcatcgggcactgaacaaagacaggaaacacatgaattgaaggtagaaagacaaacggatgacaaacaagcagaagaaatgatggtagaatggaaaagacaaaactcaacatttttcgacaaaaagcaagaatgatcttccatcttatcttttttcagtataaaataaacctatatttaacatacaggttcatgcctgcatgtggcaaagggagttgaacatggcatgaagtatcagcggcttgtcatgatcttttcgttccttctcctattatctgcctgctcacaggcacctttaaaaggacagattgagaaggtgggtttactcgtccccgatacaattaatgatcaagtttggggaacgaaaggttataaaggcttattaaatattcaatcaacatttggtgtagatgtttattataaggaaggaatggtcgacaaagagaaaatcgttgatgccattgaagaatttcacaaaaaaggagtcaatttgattattggccatggcaatgaatacagcgaaattttcaacttaattagtgaagattatccgaaaacacaatttatcacggtaaatggaaacaagcctcaggcggataatgtcgcgaatgtgacgtttaaaggtgaagcgatgggctttttcggaggcatgacagcagcacatatgtcaaaatcaaaaaagattggtattcttgctacatatgattggcaaagcgaagtagatggctttatcaaaggtgcaaaatatcaagatgaacatgtacaagtgcttgccgagtttgtcgaaaactgggatgatgcggacaaagctgtggagctctatcaaaaattgaaaaagcagggcgtagatgttgtatatccagcaggcgatggttataatatccctgtcattgaacaaatcaaagccgataatttatcagcgatcggatatgtcactgatcaatccaacctcggcagtcataccgtcttaacaagcacagtccagcatgtggataaagcgtacactattattgcgaagaaatttaatgaaggcaagctaaacgaacaaggtgactactcctttgattttaaagaaggagtgatcgaaatggggaaatttagttccaccattgaccgtgcttttgtgaaagatattgaaagtgatattgcgacttacaaaaaaactggcaaactgccaaatgaaaagtgaggatacgacgatgcagcacgaaaaatcgatggagtttttacaaattgccatgaagtattttccgcaggcaaaagaagaattagataaagcgggtattcagcttgagcccgaagctcttcagccgcttttatcattgtttacatctgtcatgcaagaggcatatgagcttgggaaagcagatgcagaatcagaaaaagccacagagtagtggctttttttatgataattttttcttgaaggcactaatcatagggccaacatctttaaacacaggcttcagttcatcgatggagttcataatgttcccaatttgattcatgacatgcatgtaatcaattgagtcttcacttggagatgtctcctcacgttcctcctttgcttctgtcttgcttttctccttttcaagcggctggccaaacatcatagccgaaaaaatatctttttgcgccatatcacatgctcctttctactatcggtatatcaataatctatgaaaaaagtgagaggaaaggttagacgtttgtattgccaaggagaaaaaaataaggtaaaattagtaccagatactaatataagatcacaatatcacatgctcgtatgagtaaaaggagtcttattcaatgaatgctggaattattggccttggccgctatatacctgaaaaagtgttaacaaatcttgatttagaaaaaatggttgaaacttctgacgaatggattcgtactagaacaggtatagaagaaagaagaattgcttctgatgatgtcaatacatcacatatggcgcttgctgctgcaaaaaaagcattagctgacgcagatgtggctgcagaagatatcgatatgattcttgtggcgacagtcacgccagatcaagcatttccgacagtcgcttgtatgattcaagagcagctcggtgcacataaagcatgtgcaatggatattagcgctgcgtgtgctggctttatgtatgggcttgttactggaaaacaatttatcgaatcaggtacgttcaagcacgtgctcgtcattggcgttgaaaagctttctcgcattaccgactgggatgaccgcaatactgctgttctgtttggagatggagcaggtgctgctgtgttaggagaggtcagcgaagggaaaggaattctctcatttgagcttggagccgatggaagaggcgggaagcacttgtacttagatgaaaaagatcatacaatcatgaatggacgagaagtatttaaatttgctgtaagacaaatgggcgagtcaagcgtaaacgtcatcgaaaaagctggactatcaaaagaagacgttgacttcttgatcccgcatcaagcaaatattcgcattatggaagcagcccgcgaacgcctagagctgccagttgaaaaaatgtcgaagacggtccataagtatggaaacacatcagcagcatctattccaatttcactatgtgaagaaatcgaagccggaaaaattcatgacggcgatgtgattgtaatggttggttttggtggcggattaacgtggggcgcaatcgctatgcgatggggccgataaaagagtgaggtgcacaaattaatggataaaaaacgagtagttgttacaggattaggtgctttgacacctcttggcaacgatgtagagtcaacatggaaaaatgctgtagcaggtgtatcaggagttggaccaatcacacgtgtcgattcaagtgaatataccgcaaaagtagcagcagaactaaaagattttaacattgaagattacatggagaaaaaagaagcacgaaaaatggcacgcttcacgcaatatgcagtcgttgctgctcaaaaggcgctagaagattcacgtcttgaaatcacagatgaaatcgcaccgcgtgttggtgtatgggttgggtctggtattggcggacttgaaacatttgaagagcagtttgaagtgtattcaaataaaggagcaagacgcgtaagcccattcttcgttccaatgatgattccagatatggcaacaggccaaatttcaattgcacttggcgcaaaaggggttaactcttgtacagtgacagcatgtgcaacagggacaaactcaattggtgatgcatttaaagtcattcagcgcggagatgcagatgcgatgatcacaggcggaacagaagcgccgttaacaaaaatgtcatttgctggtttctgtgcgaacaaagctctttcgacaaatcctgatccagagacagcaagccgtccatttgacaaaaaccgtgacggatttgttatgggagagggtgcagggattgtcgttcttgaagaactcgagcatgcgttaaaacgcggtgcgacaatttatgcagaaattgttggatatggttcaactggagatgcgtatcatattacagcgccggctccaaacggagaaggtggcgtccgcgcaatgaaagaagcgattcgagatgctggtttgtctgtggaagaaattgattatatcaatgcacacggaacaagcacaccgtacaatgataaatttgaaacaatggcgattaaagaagtgttcggagagcatgcgaatcagcttgcgatcagttcgacaaaatcgatgacaggtcacttacttggcgcagcaggcggagtagaagctattttctctgtgcttgcgattaaagacagcgtcattcctccaactattaaccttgaaacaccggatgaagaatgtgatcttgattatgtggcaaatgaagcacgttcaaaagaagtacaagtggctctaagtaactcacttggctttggcggacataatgcgacaattatctttaaaaaatacgaagcgtaatatttcctaagaaggcggcgatctataaacagatcgccgcttttttgcatatgatgaaaatggaggtgtttagcggtatgggtctagtcaatacacaatatctcattcatcaatcatcatcatttcaggagctggcattgcgctttattccttattttaaaggggcagaggaaaaagaatggtcctctattctctcccacctgcagcatcacggaatgattcggtcttttagatcatgcaaagacatgatcgacaagctcaaagaaaaagggtacttccagctcgtcatgaaagaatacagggcgctgcaaaagcagtggaaaggccctgacattcctgtctttattttgccagtcaatgagagcagcaaagaaattagagaacaattttattatcaatccggcatggcatttgacgacaaggtctttctctttttgtcgccaaatactccgaaagaacgtatcggtacattgctgactcatgaatatcaccatgtatgcaggttgcattttctcacgaaagaagaaaaagattttacattccttgatacaatcatgatggaggggctcgctgaatatgctgtgtatcatagatacggagaaagctatacagccaaatggaccactctctatgacgaaacgcagcttcagcacttgtataagaaatgggtatccagtcatcttgatcaaaaagtgcaggacgacgaaagactgatacagaacctcctttatggaaaagggaactaccccaaaatgcttggttacgccaccgggttttatattgtgaaaaagtatttcagtgagcaccgaatcagcgaggagtctatgattgcagagccatccgaaacttttttaaaggcggtagactcataaagtgaatgattcacataaaaagagacatattacaaatttactaaattcttcttgatttcgtcataacaatgtaataatatacaaatataaattttgataattctttttattcaaaaaagacagaattttttattcatttctattgtctatggagaaaggggcgaatgaatgaccaagctgcttgaagtgcaaaacttaaaaacatatttttttcgaaaaaaagaaccgatacctgctgttgatggcgttgatttcagcatcaacagaggagaaactgtcgcgttagtcggtgagtctggatctggtaaaagcattacgtccttatccattatggggttgataaacggcactggtggaaaaattatggacggttccatcaagcttgatggcaaggacctagttacatatggtgaaaaggaattatgcagcattcgtggtaatgatgtatctatgatctttcaggaacccatgacctcacttaatcccgtcctaaccatcggggaacaaataacagaaatcctcatctatcacaaaaaactttcaaaaaaagaagcgacgaaaaaagcgattgatctgctgaagattgttggtttttccagaccggaacaaatcatcaaagattacccgcaccgtttatcaggcggcatgcggcaaagagtgatgattgccattgcgctaagctgcgatccgaagcttctcattgcagatgaaccgacaactgccctagatgtaacgattcaagcccaggtgctcacattgatgaaagatttatgcacgacatttggtacatctattcttctcattactcatgatctaggtgtcgtgtctgaagtggcagatcgagtcattgtcatgtactgcggacaggttgttgaaaatgggaccgccgaagaattatttgatcagccgcttcatccttacacagaagggctgcttgaatcgattcctgtcattgacggagacatacagccgttaacggcgatcaaagggaatgtccctgcgccagatcagcttccggctggctgccgctttgctcctagatgcccgcaagtgaaggagcgctgcctaggagagctgcctaagctcaggacatttgagaatggcagaagcgtcagatgcttcttatatgaggaggcagaccatacatgacccttgctcaaaatcaaccacagccaacagatctaacagagaaagaaaccatccttgaactgaaacagatccgaaaacattttccgattaaagcgggcgtctttcagaagaaagtcggtgcagtcaaagctgttgacggcatagacttgaagatttataaaggtgaaacgttaggcattgttggggagtcagggtgcggtaaatctacactaggccggacaatgattcgcttatatcagccaactgacggtcaaatcttttttaaagggcaagatatctcccgcgtatcagaatcaaagctaagacaatcaacacgaaaaaacatccaaatggtttttcaagatccctttgcatcactcaaccctagaaaaacacttcgaagcatcatcaaagaaccctacaaaacacatcacttatattccttaaaagaaagaaatgaaaaagtagaacagcttttatcaaaggtgggccttcatccaagctttgcaaatcgctaccctcacgaattttctggcgggcagaggcagcgaatcggcatcgctcgtgcgcttgccatgaatcccgaaatgatcatcgcagatgagccggtatcagcacttgatgtatccattcaggcgcaggtgattaatctgatggaggagcttcaggaggaatttgacctaacatatctatttatctctcacgatttaagtgtggtcaggcacattagtgatagagtcggcgtgatgtatctgggcaaaatgatggagcttgccgataagcacagcctgtatgatgaaccgctccatccatatacacaggcactgctttcttctgttcctgttacccgtaaaaagggtcagatcaaaagagaacgtatcatgcttcaaggcgatctgccaagtcctgcgaatccgccaaaaggctgcgtatttcacacaagatgcccgcatgcgaagggaatctgtaaagaaaaaataccagcatttcaggaattaaaaacaaaccacttcgttgcctgccacctctacgacgcttaatcagcttggaagatctcatctttgagaggggggatgaagcggcatctgtcgtcatttctaaaaaaggatagggggaattgtatatgaaaggtagaaatagaaaacccattttggtcagtttactgctgatctttacactcatgcttgcggcatgctctagtggaaataaaacatctggagacagtgaaaagaaatcaactggaaaacctgtacaaggcggagaccttgtcatcggttcaattgcagagcctacgttatttaactcgctgtattcaacagacgtggcaagctctgatattgaggaaagaatctacagcttcttacttcaaactgacggaaagctgaaccctcagctatcgctggccgaggatattaaagaatctgatgacggcaagcagtttgatgtgaccattaaaaaaggcgtaaagtttcatgatggtgaagaactgacggctgatgatgttgtgtttacatacagcattccgatcaataaggactacaatggagagcgcggatcaggctttgaagtattagattccgttaaaaagacaggggattactcaatcgaattcaagctcaataaaaaagatccctatttctataatgtcacattaggaagctatggcattttgcctaagcatattttaggtgatgtgcctgtaaaggatctcggtgaaaatgaatttaaccgaaaaaatccaattggttcaggtccatttaaatttgccgagtggaaagaaggagactacgttaaactagaagcctttgacgattattgggatggacgtccataccttgataccgtcacgattaaaaccattcctgatcagaatgcagcgattgcccagctgtcagcaggcgatattgatttctttgctgtaccgggagcagagctgcaaacagctgaaaaagtcagcaacattaaaattgaatctgatctagggctcaattattcatacattggctggaaccagaaaaatgatctctttaaaagtaaaaaggtccgccaagcgctgacacatgccattgatcgtcaaacgattgtcgatcaagtgttagacggagacggcaaagtagccaacattccagaaagtccgctgtcatggaactatccgaagaatgatcgtgttccagtatttgagtttgatcaagaaaaagcgaaaaagatactgaaagaagagggctgggaggatacagatggagatggctatcttgataagaacggcaaaaaattctcctttgtcataaagaccaaccaaggaaacaaagtccgtgaagacatcgctgtcgttgtccagcagcagctcaaagaaattggtgttgaagcgaagccgcaaattgtggaattcagtgcactcattgagcagacgacaccgcctaagtgggattacgatgcgctgctgctcggctggagccttgccacattccctgatcaattcagcatcttccactcaagccagtcagaaaaaggcttgaataacatctggtataaaaatgaagaggtcgataagctgttagtggatgctaagaacttaagcgatcgaaaagaatattcaaaggcatatgaaaaaatttatgaactgatcgcagaagatcagccatatacgttcctttattatgccaactcacatcgcgcgatgccatctaatctccaaggctactcttaccacccgaaagatgagtattacaaaatcgagaaatggtggattgaacagtaggctgttagtgaagagggggggtctcccctttcagcgtgaagacaaacccttctattcggcgtcagtccggcgcgctggtgctcacgatcatttcattcaccaagcaccagttagattttaagggttctcatatcacgctgcaatgaagacagagggctaaaataaagactattttagccctttttcatcacagtatggcgatccgatgaaaaaggagttgtgcatatggttacatatatcattagaaggacactgctttccattcccatcttatttgggattactattttgtccttcgccattatgaaagcagcaccaggcgatccaatgtcactcatgatggacccgaccattagtgccgcagaccgggaagcctttattgataagtacggcttgaacgatcctgaatatgtgcaatatatgaaatggcttggcaatatgcttcaaggtgactttggcacttccattgttaaaaagggaacgcccgtggctgatttgatttttgcccggctgccaaataccctcatcctcatgatcttttctacattagtcgcactgatcatcgccatcccatttggtgttctttcagcaaaacgtccatatacaaagcttgactatggcattacggttacatcttttatcggactggctattccgaacttttggtttggactcattctgattatggttttatctgtgaatctaggatggttcccgacaggcggtgtttctaccttaaatgccgattttaatgtgtttgaccggctccatcacatcattttaccagcctttgttttagcaactgctgatatggcagggctcacccggtacacaaggtcgagtatgcttgatgtcatgaggcaggattatattcgcaccgcaagagcgaaaggctttcgagaaaacaaagtcattttcaagcacgggttaagaaacggtcttatgcctgtcattacgattttcggattgatggttccatcctttattggcggcgcagtggtggtggaacaaattttcacttggccagggcttggaaagctgttcatcgattctgccttttcgagagattatccggtcattatggcgatgactgttatttccgcagtgctcgtggtggttggaaatttaatagcggatattctatatgcgatcgttgatccacgtattgaatattagaagggagctgaagcacaattggcacagcctaatatgggaacacctcctgttgatctcaaattaaaagagggtcttccgccaaagccagagacgatgctgcgtttattttgtgagaaatttttcaaaaataaactggcggttgccggctccgtgatcttattggtcattatcttttcagccattttcgctccagtgattgccccttatgcaccagagcagcaagatttattgaagcggctccagccgccaagtgctgagcatttgatgggaactgacaagtttggccgagatattttctcaagggtgctttatggagcgagggtctctctgttagttggcttcgtctcagtggtcggggcgatcaccattggcaccgtcgttggagcggtagcagggtatttcaaaggatttgttgattctatcttaatgagatttgttgatgtggtattgtcgattcctgacatttttctattgatcacgcttgtcaccattttcaaaccgggcattgataaattgatattaatctttgctttgaccggctggaccacaaccgcgagactgatccgcagtgaatttttatcactacgaacaagagaattcgtacttgcggcaagaaccattggaacgaaaaaccatgtcatcatcttttcgcatattttaccgaactgtatcggtcctattatcgtgtcagctacacttaaagtaggttccgtcattttagccgaatcaacgctgagctatctagggtttggcatacagccgccaacagcaagctggggcaacatgctgcaagatgcacaaaacttctcgattatggtgcaagcgtggtggtatccgctcttcccaggtttactgatattgctgaccgttttatgctttaatttcttaggagatgggctgagagatgcgcttgatcctaaaaagctaaagtaatgcctcattttttatgacaagatgaaagggactctgcgacacgcactttgttttctttataaaaataaaaaaatgcacgccatcattcactccgcttgaagtttaataaagttggaataatttctctatcccttgcccatactgtggacaacagtttttataaagtgagggattggttatgttatttcttcatgacgtatgggtgaattggtttgaaggggaagaaaatggctacaatgtgtgtcattttcatgagtggcgtaaggaggacagtgtggagctgttagatcaagtgcctttactcaaggtgcagagtcctttgtttgattacatagagaatgatctttcagaactgccgaagacgctgctagaatctgtctttgagaaatcatatattcgaaaaaatcatgaacggcgtaaactagaatattgctttgtggtcacggacggtatccggattattgctgtggatacgattgggtattccattcctgtgaggaaaagccgcttaatcccaaggcaggagcaattggtgtatgagatggtgaaagatgtgaaggctgaggaatatgaattttctctggatagtcttgagtcggcgaaggagtatcatattttgtctttgccgccgcagcacatcagcggattaacgagaaaagaaagacagttgaagcagctaatgtttatggcgctcgatcaattaaaaggtcttcaaaacagagcagaaattgcgtattggtatacggaatggaacccgcgcatgtacaatcaaatcaaacgaatgtcattcgaagagatttggaacatgctttacaatgaaaccattgatggatggtcagagaatcatttagcattttgtgaaaaaatgattaagggacagccgttttttgaaaagctttgggaaatggaaaacgaatcaaaagtgaattagaaaaagcttgcagcgtgatgtgctgcaagctttttttatttgcgttttctgccaagacccatcgcattctccatttttttcagcattttgtttgctgcgcggtttgctttttcagcaccttcgtcaagaatgcggtcaagctcgtctgactcaatgagttcatagtaccgatcttgtattggttttaaagcatcaacgactacgttcgcaagatctcccttaaattcaccataccctttgccttcatacttttgctcaagctctgcaatcgatacgttacctaatacagaataaatcgtcagcaagttcgcaataccaggcttgttctctttgtcgtatttgacgatgccttctgaatccgtcacagcacttttgattttcttttctagctgctttggttcatctaataaggtaatgaaggatttttggttcggatcggatttgctcatctttttcgttggatctgttaaagacataatccgagcgccttcttttggaattttcacttcaggtacagtgaagatgtcattgtattttcgattaaaacgttcagcaagcgttctagtcaattcaagatgctgcttttgatcttctccaacagggactaaatcagtaccatataataagatatcgccagccattaatggaggatacgttaataggcctgaaacaaccgcttccttaccagcggatttgtccttaaattgggtcattctttctaattccccaatataagcaacacattgcagcatccatcctgcctgggcgtgagcaggtacctctgattggataaacaatgtcgccttctctggatcaagtccaactgccaaataaagagctgctaagcttctaatattttggcgaagggctagcctgtcctgactcaccgtaatcgcatgctggtcgacgacacaaaaatagccgtgataatcatgctgcaaatcgacaaattgcttcattgctccaatatagttccctaaagtcacagaaccgctcggctgaatgccagaaaaaattgtcttctttgtcatactaaaacctcttttcttcaatataaaaaggcccacccgtcacttttcaacagaaaagggacgaatgaaccgtggtaccacccttgttatttcacaaagaaatcactcaagacgttgatatcggagactgctccgtctaagcctacttacttctaaaagtgttcggttagctgctccaaagcccattccatacatgccattatctgctcccaccagccgcagactctctgtaaatggtgaatatatgtactcttctttttcatcgcaacagtatgtctatctattataaaggatgaccataaaaaagtcacgaagccctcatgtgaccttctcatcatgccgtttgacacttaaaattttagataaaaaaccaactatctgtcagaattttttaaaaaaggatgattaattatatgtataaaacattattcctgctgaatttgttaaattattttaatcaatttacgctttaatttgttgaagtgattgagactttagtttataaaaatccctctttatccccatttacgtttttttaaaatatatgaaattgatattgcaataaattattctattcattataattaatttgttcacacgtttgtgctaggctctttacatagtgaaaattcagaaaaaacaaaagaaatagaaagtaagctatttagggacttttttacgctatttcttaaatctgaatctcatcttctatcgagacctttgaactaaaacatattataagggggaatacagttgaaaaagcgttggtctgttgttactttaatgcttattttcacacttgtattaagcgcttgtggtttcagcggaaacaaatcaggcgacagcacgagcagttctggagaggctaaaacaacattaaatgtgaatatctccactgagcctttttctctacatccgggattggcaaatgattcaacttcaggaagtgtcatccgtcagacttttgagggattaacaagaattaacgctgaaggtaagccagaaaatgcaatggcttctgatatcaaaacaagtgctgatggtaaaacatacacattcacacttcgtgatgcaaaatggtctaatggtgaccctgtcacagctaaagatttcgaatatgcttggaaatgggcattagatcctaaaaatgaatctcaatatgcttaccagctttactatattaaaggtgctgaagcagcgaacaaagggaaagcgaaagttgctgatgttggcattaaagctaaagacgacaaaacgcttgtagttgagctagagaacccaacaccgttctttactgaactaactgcattctatacgtatatgccagtcaacaaaaaagtggctgaaaagaataaaaactggttcacaaatgctggtgaaaactacgtatctaacggaccattcgttctttctaaatggaaacatggcggttctatcacgcttgaaaagaacaatgaatactgggataaagatactgtgaaattgaaaaagatcaacatgtctatgatcaaagatacaaacactgagcttagcatgttcaaaaaaggcgagcttgactgggctggttcaccaactggaagccttccaactgagtctttaaaaacattgaaaaaagaaggcggtcttaaaatccaaacgatcgcaggtatctataactacaaattcaacacagaagtaaaacctttaaacaatgcaaacatccgtaaggcccttgcatactcaatcaaccgtcaagcgatcgttgacaaaattacgcaaggtgagcaagtgccagctatggcaatcgttcctccaacaatggaaggattcactgataacaaaactggctacttcaaagatcacgatgtagcaactgcgaaagaatttcttgaaaaaggtgtgaaagaattaggttataagtcagtttctgatcttccagcattgaaactttcttacaacacagatgaaggccaccaaaagattgcacaagcaattcaagaaatgtggaagaaagacttaggcgtgaaagttgaacttgataactctgagtggaacgtatacatcgacaagatccacagcggagattaccaaatcggacgtatgggctggttaggtgacttcaacgatccagtgaacttccttgagctttacaaagataaagacggtggaaacaacgacactggatgggaaagcaaagagtacaaacaattgttgaatgattctgcgaaagaaacagataaaacgaaacgtgaagaaatgctgaaaaaagcagaagaaatcatcatcaacgatatgcctatagcaccaatttacttctacactcagctttgggtacaagatccaaaactaaaaggtgtggttgtatctggactaggtgatgttcaatacaaatgggcacatttcgaaaagtaagaattatagtgtaagagatctacggcaaggatcttaaggtatatggaggatgtctctccatatacctttcttgctgattagagaaaatgttgtaaaatcatggaggtgcaattccgttgcttaaatatatcggtaagcgattaatatatattttaatcacactgtttgttattgtaactgcaactttctttctcatgcaggcagcaccgggtggtccattctctggtgagaagaaacttcctgctgaaattgaagcaaacctaaacgagcactacgggttggacaagcccttatttgttcaatatgtaaactacttaggttcagttgcaaaattagattttggtccctcatttaaatataaaggacaaactgtaaatgacttaatcagttctggattccccgtttcctttaccctcggaattgaggcaattctcctcgcattagcatttggtgtattgtttggggtccttgcagcgctctatcataacaagtggcaggactatacgattgccattttaacgatctttggaatttcagttccaagtttcattttagctgcgctgctacaatatgtatttgcatctgaggcaagcgttttagcgattttcccagttgcaggatgggagtcttgggccagcaccgtactaccttctattgcactttccttcatgcctatggcatttatcgctagacttgcacggtcaagtatgcttgaagttctaaacagtgattacattagaacggctagagcgaaaggattaacgaaatcagctgtgacgattaaacacgcaattcgaaacgcattgttacctgtcattacatatatgggaccaatggctgcttcagtgttaacaggtagttttgtcgtggagaagattttcggtattcctggattaggctctcactttgtcacaagtattacaaaccgtgattacaccgtcatcatgggtgtcacagtcttctacagtattattctattaatcagtattctagtcgttgacgtcctctacggtattatcgatcctagaattaaactgacgaaggcgaagaaaggggtctaacacatggaagagatgagaaaagatttatttgttcctgcgacagctgacgcagcagaatctgaaaaaatttctaaacctagtctatctttatggaaggatgctatgcttcgcttccgtgcaaataaacttgcaatggttggtctttcaatcatttttattattgtgatgctggccatctttgttccgattttttctaaatatgattactcgacgaccgatttactgaatgcagaccagccaccttcaaaagagcactggttcggtacagatgatttaggacgtgacatgtttgtccgtacatgggtcggggcaagaatttcgatcttcatcggtcttgctgcagcggtccttgacgtgatcatcggtattatctggggaagtattgctgcgttcaaaggcggccgtacagatgaagtcatgatgcgtatcgcagacgttttatgggcaattccaacactattaatggttatcttaatgatggttgttctgccaaaaggattattaacaattatcctcgccatgacagtcgtaggctggataaacatggcacgtatcgttcggggacaggttctacaattaaagagtcaagagtacgttcttgctgcacaaacattaggtgcgaaaacatctagacttttatttaaacacttaattccaaactcaatgggaccaattcttgtcacaatgacactcaccattccttcagctattttcacggaggcattcttaagctatctaggacttggtgtaccggctccattagcgagctggggaacaatggcgtctgacggaattccggccatgacgtactatccttggagattatggttcccagccgcatttatctgtataacaatgtttggttttaacgtggttggagacggactaagagacgctttagatccgaagttgcgtaaataaggagtgattaggatggaacgtgaacgtattctagaggtgaaagaccttgcaatctcatttaaaacatatggtggagaggttcaagccattcgtggtgtgaactttcacttaaataaaggcgagacacttgctattgtaggtgaatctggctctggtaaaagtgtgacatcacaggccatcatgagattaataccgatgccgccgggttatttcaagcgcggacagatcctgtttgatgggcaagatatcgtcaagaaaacagaaaaacaaatgcaaaccattcgaggaaaagacatctcaatgatcttccaggatccgatgacttctttgaatccaacgatgaaagtcgggaagcaaattacagaagtactgttcaagcacgaacaaatttcaaaagaagcggctgaaaaaagagccattgaattactggagcttgttggaattgcaatgcctgaaaaaagaatcaagcaatacccgcacgaatttagtggcgggatgagacaaagggttgtcatcgcgatggcgctcgcagcagatccaaagctattgattgccgatgagccgacgacagcactagatgtaacgattcaggcgcaaattttagaattaatgaaagaaattcagcaaaaggttgaaacatctattatctttattacgcatgatctaggtgttgtcgccaacgtcgctgatcgtgtagccgttatgtatgcaggacagattgtggagacagggactgttgatgaaattttctacaatccaaaacatccatatacgtggggacttttagcatcaatgccgagccttgacacagatggcggagatgaagggaagctgactgcaatcccaggaacaccgccagatctgacaaacccgccgaaaggagatgcatttgcactccgaagcgattatgcaatgaaaattgactttgaacaagaaccgccaatgttcaaagtatcagatacgcattatgtgaaatcatggctacttcatccaaatgcacctaaagttgaaccgcctgcttctgtaaaggcgagaatgcgtgaactagaaggtagctacgaaaaacctgtattagtaaaagagggtgaatagcatggcagaaaaactgttagaaatcaaaaatttgaagcaacatttccatacagcaagagggactgtgaaagcagttgacggagtttcatttgatatttataaaggtgaaacacttggccttgtaggggagtctggttgtggtaaatccactacgggccgctccatcattagactttatgatgcgacagatggtgaggttctttataaaggggaaagtgtacacgggaagaaatcaagacaaaaaatgcttgagttcaaccgtcaaatgcagatgatcttccaagatccatatgcctcactcaaccctagaatgacagtccttgatatcattgcagaaggcatcgacattcatggcctagcaaaaacaaagcaagcacgtaaagagcgtgtgtaccaattacttgaaactgttggcttgaacaaagagcatgcaaacagatacccgcatgaattctcaggtggtcaaaggcagcgtatcggaattgcccgtgcattagcagttgaaccagatttcatcatcgccgatgaaccaatctctgcattagatgtgtcgatccaagcacaggtcgtcaacttaatgaaagaacttcaagaagaaaaaggattaacgtacttattcattgcccatgacctgtctatggtaaaatacatcagcgatcgtattggcgtgatgtatttcggaaaattggttgagctggcaccagcgaatgaattatacgaaaatccgcttcatccatatacaaaatcattactatctgcgattccgctcccagatccagattatgagcgtaaccgcaaacgaataaagtatgatccatctgttcacaaaggaacgaacaccgagttccgtgaagtgaagccaggtcactttgtgagctgcacagaggaagaattcaaagagcttcaagctaaacaatcataagaagaaagaagcgctgctatgtcagtgcttctttttttattttacaaaaaaataagatgatggtaatttctagataacaacaagcaggttctaggaggaaatcagatgtccatatggaagacgtttcgctactcattatttcactttctaattgtattcatgcttttttcaacgtcttttttgaggaaaccaaatgggggacagtggatgctcgtgtttatggtgctcattggcattgtgtctttttcggtggaatatatgcttaaccgaaagacaagcaatcagaagcaagaagcacggcgcatgaagtatctttatttcattatgtttcaaatagcgatgacacttatcctctttgtttgttttcaactactcatagaccgttcgatataaaacttttttctgttgtttgaaaaaaagtgaaactagtgaagactttgctgcgtcttactagtacaggcgtttaaataataggaaatcgggaatatctaaggaagtggttcttaacgatatcataaggagcggatccatgaattggtatgaaaagctcagtgaatacttcccgatagaagaaatgaagtcaaaagagcatatggaagctttattaaaggaaagaagtgatgtttatcataaggaggaaggacctcatcatgtgatgatgtacgccgaatttgattctttcatctttattgattatttatttgtttccagagatgcaagaggtgaaggcctcggatcaaagctcattcataagctgaaggaaaaaaagaaaccgatcttgcttgaggtcgagcctgtagatgaagatgatgcagatactgcaaaacgcctaaagttttaccaaagagagcacttcaagcacgcagaatcaatcggttataaacgcaggtcacttgcaacaaatgaagtgaaccgcatggaaatcctttattggtcgcctcttacagataatgaggaagaaatgatggaggctatgaggaagacctatgaacgaatccatacgtataaagatgaagaatggtatgggcagtcgtatgaggatgttgatgatgtattgaaggtcattgaaaatagaaaacaaaaaaatattttcgatcatctcgactaaatgagaatgttcagacatcaaacggcaccacaaaatgaatgaaattgtctagtttttgtcacaaaaattgcaagaaaatctgttcacacttacttttttatagtataatcactataaagattacttatttagaacaattttaatttaagaatacagatcaatattcattctacaaattgaggagtgaagatttatggtaacattatacacatcaccaagctgtacatcatgtagaaaagcaagagcgtggttagaagagcacaatatcccgtatcaagagagaaacatcttttctgagcctctttcaatcgatgaaatcaaagaaattcttcgaatgactgaagacggtacagatgaaattatctcaacacgttcaaaagtattccaaaagctaaatgtgaatgttgagacaatgcctcttcaacaattgtataaactgatcaatgagcatccaggtcttttaagacgtccaatcatcttggatgaaaaaagactacaagttggctacaatgaagatgaaattagacgtttccttccaagaacggttcgtacattccaactaagagaagctcagcgacttgctaactaattgaaaaacgaaaagctgccgatcatttggcagctttttttatttgttttcagctgtttgttcgtaaaataagctggctaaaatgaccattacaaccgttaaaaacgggagcatgaattcaagagtcgcatgctgagccataaattcattcaatttcacatcacgaacaatcatttcaccgccagtaaaagccaaaagagcacttcctccgtataaaagaaacgggaatttggttaaagcggcatgaattagcttacttccccaaataataatcggtactgaaatcataaggccgaaagcggtcagcagcatgttgccttttgccgcacctgcaactgcaatcacattatcaagtgacataaagagatctgcaatcacaatggtctgaaccgcacgccaaagggagccgctgcttttaatgcgaatcgattctttcttttgttcaattaacaaattgtatcctatataaaggagaaaaagcccgccgataaattgcaaataagggatggtcaataaataaactgcggcacctgtcatcgtaattctcatcagcactgccaaaagtgtaccgatccatatggctttattgcgtttgtcatttgataagctgcggctagccatcgcaatgatcaacgcgttatctccgcctaaaatcagatctatgccaataatcatcagtaaggatatgatccactctgtttccatccatttcacctcatgtctaatagagctcgtacaaccaatatatgaggacaattcaaatatatgtttctgtaagttttctctgcaaaaaatgcgtttttatttcttttattcatgttttatcataaaatagacagtacgaagcaatacctcaattctttaaaaggttaacatgtagacggaacgggtaaagtgtagtaaagtactattaattgggagcttgtatgtcccttcaacatcttatatagaagggaaggttggcaaaatggaaatcgaaagaattaatgaacatacagtgaaattttatatttcctacggtgatattgaagaccgcggatttgaccgtgaagaaatttggtataatcgtgaacgcagtgaagagctgttttgggaagtaatggacgaagtgcacgaagaagaagaatttgcagttgagggacctctttggattcaagtgcaggcacttgacaaaggtcttgaaattgtcgtgacgaaagcccaactttctaaagatggacaaaagctcgaattgccgattccagaagataaaaaagatcaaacagatgaagaaagtctagacgcactgcttgatgattttcaaaaagaagagcaggatcaagaagaccataatgagaaggacaaaaaacttcaacttcaatttgtgttgaaaatggatgactttgaagatttgattgcactttctcaattaaatatgcaggattttaccacaagtttatattcgtttgaaaaccgttattatctatatgttgacttccacgaggatttgtcagatgagcaagtggagaataagctcagcattttgcttgaatatgctcatgaatcagtggtcagcatttacagactgaaagaatacggtcagctgattatcgaaggaaatgcccttgaaacgattcaacagcacttctcgtaaccaacaaaagtcgatttctatagaggaatcggcttttttatctgaatgaataggtaaataaagagatcggcaaggagaaaatgaaatgagaaatttagtcaaagttctattttttcttatcattacgataggtgcttatttagtcattcaattaattgctggtgatttagcggtaagtgtattaagttctgtcagtgttctattcactttatcgattatcttcatcgggtttgtcatattcttggagaaccggaatccatctcaaacaataacgtggcttgtcctgcttggcagctttccgttattcggctttctgttctatattttctttggacgcaatatcaaaaaacgcaggctgtttgaaaagaaagccattctagatgaacagttaatccaggaagatgagcatattcatagagaagcgattgagaaaatgacgcatatgggtgatcatcagcagctcttatttaagctggcccacagactcggacatacccctattacgtatcgcacgtcctctaaagtcctgacgaatggagaagaaacattctctcatatttttgaagaaatcaaaaaggcgacacatcacattcatttagaatattatattctccgccacgatgaccttggacaagaattaaaagatattctcattgataaagcgaaaaatggcgtgattgtccgctttttatatgacgatgtaggaagcttaaagctctctcgtcaatatattgctgacctcgaaaaggccggcgttcagatcgttccatttttacctgtgagactacccctgttaaataataaaatcaatttccgaaatcaccgaaaaattgtcgtgattgatggagaagccggatttgtcggcgggctgaacattggagacgaatatatgggcagaagcagacaatatggattttggcgtgacacgcatttgatgattaagggggaagctgttcgtgacctgcagcagattttcatgcaggattggtactatatgacgaatgaaagatgcgcaggtgtggactacttcaaagatttcagccaccttgagagcacaacagaaggcgtacaaatgattgctggcggtcctgataaacagtgggaggtcattaaaaatctctttttctccatgattatctctgccaaaaagtctatttggatcgcttcaccgtattttgtgccggatgatgatattttgtctgcattaaaaattgctgcattaagcggagtagacgtacggattattgctccgaagaatccagataaacggatcgtcttccatgcgtcccgttcatacttcccagagcttttagaagcaggagcaaaggtgtatgagtatgatcaaggctttatgcatagtaaatttatcattgtggacagcgagctggcttcgataggaacggccaacatggatatgagaagctttcatttgaattttgaagtgaatgccttcctatataaaacgaaaagcacagagaagctcgtgaacgacttcttaggtgatttagagcagtcgcatgaaattgtcccagaagaatttgcaaagagaccgttaagggtaagactgtttgaatccacagcaagattattatcaccattactataaagattgtattttccccctttttatcagggggttttttcattttcctcaggaaaacatcagtaaaatcatgttttgatatgataaaagttcaatttgcctattcgcttcttaatagacgaacaagctataatacggtcatcaaagagtaaggggcgagcagaatgaatacagcgatcatggataatggaaagcttattcgaattacacatcatttatctaaaaaccggctggagcatgtaaggacgacgtgcaaattttattgtcctgattgcagggaagaggtgcaattaaagcttggtgaacaacgtgtgtatcattttgcacataaacagctgacagcatgtccactagcctcaagcgaaacggcttatcatcaggcggggaaagaagccatcatgaattggcttcagcggctgggacataaaccggtgcttgaaaagtatgtgtcaaaggttcatcagcgtcctgacgtggccgtctctattggaggaacaagttatgcaatagaatatcaatgctcaaatatttcacggcaagagctgcgcaaaagaacagcagggctccgtgaagcggggctcatccctatatggctaataggggcaaatcgtttaaagcgaatatctgcccagctcttttccttctcctccattcattggggaatgttaagggaatcacagaaagggagtctgattttttactgtccgctccagaatagattcatccatcttgctcaacttctcgtatttcaaccaacgaaaatatgtgccgccatgactgtcagaccgccaacagcataccgcgaactttcggcgctcctatctccgccctcaagcaagcgtccagtctacaagcaatggcttagatgcatacggcaatttaggcagcggcctccccgcattttatcaaatgaaagcaagcggttgagagacattttctatgagcatcatcaaatggctttcccttttctgccaactgaattatttatcccgctgaaagaaacgtatatttttacaagtcctgtttatgtctggcaggggtgtctgtatgattggatgatgaggaaaaaaggaagcagtccagtaacggttcaactgctgatgaaagaaatcaagcggtgtgtccagatgaaagaagtaaagctccgatacggtgatgtttcaatagaagaaatacaagaggtcatcactgcatatgttaaggcgcttgtcagacaagggtttttacacatgacgaaaaagggtaattatgaagtagcgtcgaatcaaatgccgatacgaacagtagatgaagcgttcaaacgagatgctttcttatttcgttagcatgtttcatgcccactttgatcatgataagaaaaaggtggtgctgcgattgaatagaaagaaacgcttttttctcatttttttagtctgtttggtatttttttctgcatatgatttgacaaatatagttcaaaacaaagaagataaatacaacaccaatttctttcactttccgaaaggttggttcaacacaacttatgcaagggggattcatatgacttcacaaagcaaaaataaccatttaccagacagaagcgaagtaaaagaagaaaacaaatggcgtcttgaagatattttcgaaagcgttgatgcatggaacaaggaattcgaagctgtcaaaaaagaaattcctaagctagcccaatttaaaggcaagctggcccattctgctgatgtactgtatgaagccctaacctttcaggatcagctttctgaaaagcttggtaagctttatacatatgcgcacatgaaatacgatgaggatacaactaactcatcatttcaagcgctgaatgataaagcatcgaatttatttacacagctctctagtacttctgcttatattgttccagagattttatcgattcaagaagataaattgcagcagtttattctggaaaaagaagaattaaaactgtattcccatgctctcgaagaaattaataaagagcgtccacatattttaagtgaggagcaagaagctttattagctgaggtctctgaaccactctcaacttcatctactacttttagtatgtttaacaatgctgatatttcgttcccttctgtaaaggatgaaaatggggaagaaaagaagattacccacggcaactttatcacatttttaaacagtgatgaccgtgaagtgagaaagaatgcctttaaagctgtgtataaaacgtatgatcagtataaaaacacgcttgcttcgacactgagcggttcgattaaaaaggataatttttatgcaaaagtacgaaattataactcagcaagagaagcggcactatctcggaacagtattccagaagaagtatatgacaatctgattgatacagttcatcaatatttaccgttattacaccgttatattgaattgcgtaaaaaggtattaaagcttgatgaagtgcacaattatgacttgtatacaccacttgtaaaagatgctggtatgaagctaacctacgatgaagcaaaagattatatgctaaaagggttagcgccattaggagaagaatatgtgtccgtgttaaaagagggactgagcaatcgctgggtagacgtttatgagaataaagggaaacgcagcggtgcgtattcatctggaagctatggtacaaatccatatatcctcatgaactggcaaaataatattgataatttatttacactggctcatgaatttgggcactctgtccacagctactatacaagaaagcatcagccatatccgtatggaaactatagtatctttgtagctgaagtggcttctacgacaaacgaagcgttacttggcgaatacctgctgaatcatctagatgataaaaagcagcgtttgtatgtgctaaatcacttattagaaggatttagaggaacggtattcagacagacgatgtttgctgagtttgagcatctgattcatgtgaaagcacaagaaggagaggctttaacgccggaattcatgacgaacctttattacgacctgaacaagaagtattttggagacggcatggttgtggataaagaaatcggattagaatggacgagaatccctcacttctattacaactattatgtctatcaatatgcaacaggctatagtgctgcacaggcattaagcaagcaaatattagaagaaggaaaacctgcggtggagcgctatacagacttccttaaagcaggaagctctgattatccaattaatgtgttgaaaaaagcaggtgttgatatggcttccaaagaaccaatcaaagcagcatgtcaattgttcgaagaaaagctgaaagaaatggaagagctcatctctaaaacgggtaagtgatgaaaagacttctgtcagacgtgtgagtgcaaactcatcttttgacaggagtttttttctcataaaaaaagacctcttcgcatgtagaggccgttccttatcatcaacctttaaatcccttaaaggtcttccggtggttcattcgataaagtgtaaaaagaatagaagcaaataagagtggggatgttagataaagaggaagcattttcattaagcctaatatatttaaaaagaaacataagccaatggaaacaagtccaatggttgtgctgcgcatgcagatccctccattttttcgttactttcactatatgaaagtgacaaccctcttatgttttgtgacaaaaatatgaacatatagtatatctgttgtcataagtcgacaaaatttgatatactacagatgtgaaattaatcacatacaaacattacccctttgtttgaccgtgaaaaatttctcccatcccctttgttgtcgttaagacatagtgaaaccgcgcttatcccggcgcggtttcttcgtgcttaaaaatagaacgggtgttcctttttagggtaaagaaaaaacatgggtcagcacccatgttcattctcacagcggtagagatcaagatctgaatgatgatcatctactttatagcgccaaaacatttcttgatgtacttgtacacgttctacctttttagcgaaagccagctttttcatttctcgttcaacttcttcaagtgtcaggtcataaacgacagcaatctcttttgcagatgcaaattgaaagtaagcaataaaccattcaattggaggccgttctgaaggtgttggtttttcaccaatcatttcaaaaaggatttcctcgtatacatcataagagtacgcacctgaaatttttaatccttcatccccgtttactgtattaaaaaaggcaaaggtcggaagctcagatacgtccatttcagctgcaattttcatatcacattgtagtgctttaacagcactttgagaatgaatatcgcgctggaattcctcgatgtccagtccagcactttttgcattttctagcagcacatgttcacttgtcacatcttgctgatggcaaaaaagtgattcttgaatgagacgcagaaacttcattccgcattttctgccttgaagctcagccgcttttaatgcaagcgaggcgaggtagggtgaagtcacaatttgttcggacagcatttgttcttttttggtctgagttttggtagcaaatttcccccatgcttcggtcagtaaatgcttttttcgttttcgattcaatgcattaatactagaacttgtcaccgttcgtaaagtgaaaaaacggccgtacttcattttcaattttttaatggatggctctaataaccagcagtctggacttagagggtcaatgaatacatagatttcaatcggcttttgaggatgtccgtgacagtgtgagaaatattgatcgtgcgtattgcagctcaagatcgtccatccttttcaggtgtttgattgaccatatgacgagccgttagagaaagccgctcaaataaaaagtcacgaatatcgccggttaatcctacttgatccatcgcatcctccatgcattcaagccatgcgtcagcccgctcctcagtaatcggaaaagggagatgtctcgcccgcagcatagggtggccatgctcctctgtataaagcgggggtccgcctaaatattgagttaaaaactgtttttgttttcttgctgtttcttttaagtcatccgggaaaataggatgaagcaaaggatgacactttacattttcataaaaagtatcaacaagttgcgatagaagttcctctccaaccgcttcgtaaggtgcgttaaacgattgtaccatgttgactactccttttactcgtagttaataggatgaagcgccctattgtgaattcatttatttcaaaagtgatattcagtttgttctattttattgtttctattcttgtatacttattttaacaacctcaactcaattccacaaacaaaccgctttggtctattggaaataaggggagaggcgggttccgtgatcaattgaccatatcataacacattcagtcaaaaaagggtgaaaagcgacatacaaaaaaccgaagaggttattctcttcggtttaagcgaaatattgtgctgtgattttctttacataattttgtgtttctttaaatggtggaatgccaccgtatttatcaacatttcctgagcctgcattataagcagctaaggcgagtgagacatttccattatatttctgaagcatttgttttatatacttcgtaccgccttcgatgttttgggccgcatcaaaggcattattcacaccaagtgacttagcagtagatggcataagctgcatgaggccaagtgctcctgcatgactgaccgcattcgtacgatagccggattcttgcttgatgaccgcatgaatcagcttctctggaacgccatgcttttgagccatttgtgacacgatttgattaatttcttttgatgatgagccgtttgaaacagccttttgaagcggcggcgtgtagctgttgtttaagacattcccaatgccgttcgctgtattcaattgagcgtcattcgcatatgaagatggagattgaagctgctcactgccagcgatagcagacaagtatgggtttgtacgcgcgtattgcgtgttcggagccgttgatgggtccgttcccataaacgcagaaatagaaagcggcaggcgtgataattctgatccgccgcctaaaaaatcttgcagcagcgactgaaatgaagcttgtgcattcgattcttggccggccggtatttgtgtttgtccagggtctgattgtaacgttttaagcgcttgaagctgcataaaggattgaagttgattgacgttcatcatgttcctccttcaaggaattcatctattctgtgttttcattttctcttcataaaaacgtacgactttgtttttcgtgtttcgtacagggatttggaatttttggagcaatgcggagaatgcggcttgtccgatttccaggtcgctcacttcaaattcaagttcatagtcctctactgttaaatatcggctgtgatccaaaacaattaagccttctttgatctttttttcagctcttgatgtttcaagtgaaccaaaatacacaatttgatccttttgaatgttcagatggtctaacctgtcagctacttcaccttctggcagctgaaaatcgtcaaggcttgaaggaggagcgatcgtttggtgggtttcgagcaagcctatttcgtgtggttcctttaacgtgagaacccactgaccgtctttttctctcattcttagtgcagcgaattgagattttatatcaaattgaggtgtatcaaagtaatagttggtttgtgtgtgaaaatccgaatccttcaattgaaaatgttgtttcagctgttcaaattcttctttcattaacaattgctttagctctatttcaatttcctgtgccattttgacatcaacctttcatttagaggaaatatgattattgtacatgaagtgtgttcatcatgtaaaaggctgtttttatctcttatttctctttccacatgtgccaaaataaatggagaatcatgtgaaaggatcatttataagaagaaaataggattttctcaaaaagttcggtttatcaatattgaacttgatatgataaaataaagctgtactttgttgtaaaggagatcatgatgcaaaaccgaattgaaatcacagaagcaactttaaaagaagacaggctaattttgacgaccacgtcagaagagcaaatccaaaaagcaaaagcatcaggacaaatgcttgttgattctgatcactttgcgttcgtttacatacttgaaaacgaggagtccttttcgtatcttatcttaggggaacatacatgggctccaataaaagaagcaatgaatcttgacatccctgtctatttggcagcgggagaacattcgttagaactcattcagcttcatcaagaattacattatttaatcgacaatattaaagacaatgccaattacggagatatggaagagaaagtgaagagcacattcctctgaaataattaggtatatggaattgggggaagtttcatggacaaaaaacaatgggatcaattcctcgcaccgtataaacaagcagtcgaagaattaaaagtgaaactaaagggcattcgaaagctgtatgaatttgaggatgaccattcaccagtagaatttgtcacaggccgagtgaaacctgttgccagcatattagaaaaggcaaagcgtaaaaacatcccgatgcatgaaatcgaaacgatgcaggatattgctgggcttcgcattatgtgccagtttgtagaagacatacaagtcgtgaaaaaaatgctccagtcacgaaaagactttgtggttgttgataaacgcgactatattgcagaacataaagaaagcggataccgttcataccaccttgttgtgttatatccgctgcaaacgatcaacggagagaagcagctcctcgtcgaaatccaaattcgtacacttgcgatgaacttttgggcgaccattgagcattctctgaattataaatatagcgggaatatcccggagaaagtcaagctgcgccttcaaagagcttctgaggcagcatctctgcttgatgatgagatgtctgaaattagaggggaaattcaagaagcacaagtggcattttcccggaaaaagaaaaacgatagctgagcctgagcttgatcaaatatgatgctgccctctcatagcagcaaggtggaaaaggagaagaattcatgaaatttgcagtttcttcgaaagggaattctgtatctgacacactcaaaaataaaattcagacctacttattggatttcgggatggaactcaacgaagaggaaccggatcttgtcattacggttggtggagacggcacccttctttatgcgtttcaccgttatagcgaccgtctgaatgaaacagcttttgtcggtgttcatacaggtcatcttggtttttatgctgactgggtgccaagtgaaattgaaaaactcgtcttagctattgcgaaaacgccttatcacattgtggaatatccgatcttagaagtcattgtcagatacaacgacggcggcagagaagagaaatatttagcgatgaatgaatgtaccattaaaagtatggaagggacgcttgtggcagatgttgaaattaggggtcagctgtttgaaacattcagaggtgacggtctttgtctgtctacaccgtctggcagtacagcctataataaagcacttggaggcgccattattcatccttccattagagccattcagctggcagaaatggcttcaatcaacaacagagtgtttcgaacggtcggttcaccgcttattttgccagaccaccatacttgtgtcattaaaccgatgaatgatgttgattttcaagtaaccattgatcatttgacgctgcttcataaggacgtcaaatccattcaatgccgggtagccgacgagaatgtccgttttgcccgatttagaccatttccgttttggaaaagggtgcaagattcctttatcggaaaaggagaataagaaagaggtcgttctcgctggaatactttacgctaaataaaaccgtgacagccaaagaagaagggctgcttttaaagaattatttaatagatcttggcatttcaaaaagaatgctggcggatattaaatttgatggcggtgatctcctcattaatggagagcatgtgactgtgagatacaagctgcataacggagacaggctcaccattttattcccagaggaaaaagtgagtgaagggctgaagcctgctccgattccgcttgatattttatttgaggatgagcatgtccttgtgctgaataaaaagccatatatcccgtccattccttctcgggaacacccagagcacagtattgcgaatggattgctgcaccattatgcagagcagtctgttcggctgacggttcatttggtgaaccgccttgatcgtgatacatcgggcgtcatgctcgtggccaagcatcgctttgcccacagccttttatcaaaagcgcaaaaaagtggagcggtcaaacgaacatacagagcgtttacacatggcatgatctcggaaaagtatggaaccattcgtgcaaaaattgcccgaaaaggagatagtatcatcgagcgaatggtcgatgatactggacaggaagcagtgacgcattttaaagtgcgagcggtagacgctgagttgaacatgtcagatgtggctttagcacttgaaactgggagaacacatcaaattcgtgttcatatgaagtatcttggtcacccgctcatcggagatacgctatatggcggaacgagtgagcgaatgaaccggcaggcactgcatagtgagactcttgtctttcctcatccgatgactggggaggaattgacattctcggctccgcttcctgaagacatgaaatcattgctgctttaaatagagaaacccggctacctgcaagcgcaggaccgggtttttttatgatgtgaaatgttgaaaccttgaatcgtcataaggcatagaggaaggaacagagaccgtttcaagctcaggatatgtgagggcagacagccggtggccaaatacgcagcctgtatcaatattgacggttctgccaacgaatcggggttctttcactggtgtatgtccgtatacaatccacggttttccgcgatattcctttgcccaatccttcctcacaggtcgtccatccggccatgtttctcctgtgaccgcgccaaataatagataggatcgcatctgtttgttcggctttcttccaatgtccttttccttcatcgctgcgtgagcaataatcagttcatcaggaatgagtacatcgtaaagcggagccttctcaaatagctgcttaaattcatgtgacaatttggtttgttcatgaaggggcagcttttttatttcgttcactgtggtttcgatgccatgaagtaatttcacgggatttcctttcaaatagcgataaagcttaaagcaatggttgccaggtacgtagcggatcgcgccgtgtgcgtaggcatgaatgacaaatcgcatcacatctactgactgagggcctcgatctgttaaatcaccgacaagggctagcgttctcttatcaggatggacgggtaatccatgtttgagttcgtatcctagtttgtgtatgagggtaagcagctcttcgtagcagccgtggatatctccaatgatatcaaatttcataagatttcctcctgatctttctcatccattcatcggggttaaagaagtttgaattttagaacatataacgaatggctttcttttcatttaggcaattgttagaatcaatgctttaacgtaaaacttaaaagattaaacatcaatgttaggaggctttagccaatggagcatacatctgtttcatcactcgttgtcgttattattgtcgcctttttcaccccacttttattgcaccgatttaagctgaccattccggtcgttgttgctgaaatcatcatggggctcatcattggaaaaagcggtcttcaactggtagttgaacatgatgcatggttagacacgttatccatgctcggttttatttttctgatgtttttaagtggacttgaaatagatttttcttcttttgagtcaaagaagaaagcacgagaactgccaaatggtctaaaagaaccaaatacgtttaaggcagccacgattatttttgttggcgtatttagtatttcttttatcctgtcctatgcgtttgtccttgcagggtttatccaaaatgcctttttaatgacgctcattatatcgaccatctcattaggggtagtggttcccaccttaaaagaggaaaagttaatgcagacgaatatcggtcaaatcatcttgcttgtcgccgtcattgctgatttggtgacgatgattttacttgctgtgttttcctccatttatggcgatggtacagggaatatgtggcttctgctcttattatttgctgcgggcattctgctttatttatttggccgcgtatttaagacaaagtcgatttttcagtccatgtcaaaagggaccgtgcaaattgggacaagggcgatctttactctcattatagtcttagttgccttatctgaatcactcggtgctgaaaatattcttggggcgtttttagcgggcgtacttgtgtcccttctttcgccgaataaagagcttgtccagcagctggattcatttggctacggatttttgatccccatcttctttgtgatggtcggagtggatttaaatatatgggcactgttcaaggacccaaccattatgatcatgatcccgctgctgtttattgcattactggttagtaagctcatcccgattctttatttgaaaaaatggtatgacatgaaaaaagtgatcggttctggctttttattaacatcgacgttatcactcgtcattgcagctgcgacgataggggagcggctcggagtcattgaccataaaatgtctggagcgctgattctagtcgcggtactcacgagtattttaacgcctgtttggtttaaagcgctgtttaaaaaagaacaagctgcgagccataaaaaacgtgtgacctttattggtgcaaatcagctgaccttacctgtcacacttgatttacatcaggatgaatatgatattcggattttacatgtctttcaagaaaataaagaagcgctgcttgctgactccatctttgaagtcgaatcgattgaagagtacgacgatgagacgctgcgaaaggcaggcgttggccaggaggatgtcctcgtcgtcgcaacaggcagtgagacgaaaaataaggaaattgctttatttgcaaaggaagaaggagcgaaacaagtcattgctagtgtcaacaaagctgagacagagctgacattgaaggaagcaggcattgatacgttttctaatttcctatcatctaaaacggtgctaagagccttgattgaagcaccggatgcgattcgattattaacaaatgaggatacttctttgtatcaaattcaaatgaacaatcatcgttatcacaatgtcatgctgagggaatttccgtttaccggtgatttggtctttgtccgtattttcagaggggtagacagcttagtaccacatggagataccacgcttagaagcggcgaccgtgtgcttgtgtcaggctctcgtgagtatgtggcaggactaagagcccaattagagtaagaatgaacccttgaccaatgaacaattcctgattaagatagaagtacaacatcatatatttgatccactaggggagtcctttaaaagggctgagataaaagtgtcgacttttagaccctcattacctgaacaggttcatacctgcgtagggaagtggtgcggtttttgactatgctttttacaaattccaagccactttccacgcggaaagtggcttttttatatggaaaaacaggaggagagaaacatgacgttttcaactgaatgtaaagaagcagcagcaacatggtggaatggaagcttcacacacccatttgtcaaagggattggagatggcacgctttcactcgatcgtttcacgtattatgtgatgcaggattcatattatttaactcattttgcaaaggtgcaagcatatggcgcagcgattagtgaggacttacatacgacgggcagaatggcgtatcatgcgcagggtacgtatgaagcagagctgtcgctgcatagaaagttcacagagcttttgcagatttcagatgaagccatcgagaactttaagccttctccgactgcttatgcgtatacctctcatatgtaccgatctgtgaaaagcgggcgatttgaagagattttagccgcattattgccgtgctactggctatattatgaggtgggtgaaaagctgaaacaaaccacacctgaccatccgatttatcaggaatggattttgacatatggaggggattggtttaaggagctcgtctttgaacaggtcaaccgctttgatgaactagccgaaaaagcgtcagaacaagtacgggccaatatgaaagaaaattttgtgatttcaagctattacgagtaccatttctgggaaatggcgtatcaaaaagaaacatggcaaacagcatgcttagatggggttggtgcaaatggaactccacgcagtgacaaatgattcgcttcctgtggatgaactgatcaaacaaataaaagccatcgcacctgaagtggattttattcatatccgggaacggtctaaaacagcaagtgagcttgttgatctcgtgaaaagactctttttagaaggtgtaccgaaagagaagctcatcatcaacgacagagtagacgttgcactgctcaccaatattcaccgggtacatctcccaggccatagcttttcgccaaaagagctgcggcaaaaattccctcaccttcatgcgggtgtctctgttcattcgatagaagaagcgaaagcagcggagaaaaatggagcagagtatgtcatgtttgggcacgtatatgacaccacttgtaaaccaggacttcaggcaagaggcgtacagcttgtgaaagaactgacatcttcactgtctattccagtggtggcgatcggtggattgacacctgaccgcattccagaattgaaacacgcgaatgtgaaagggattgctgtcatgtctgggatttttactcatcatcagccgcgcatgatggcacaagcattttctaaacaggtaaaggggcatccttatgaagaagcattatgacgttgcaatcattggtggtggaatcataggaatgtccattgcctatcaccttgcaaaagcaggaaagcaggtcgtcttacttgaggcgaatgaggtagggaagcaaacgacaagtgctgctgctgggatgctcggtgcacatgctgaaggagaggggcatgagaatatttttttccaagcaggcagagcaagccaggcattgtacgagaagttaaaagtcgatctacagcatgaatctggcattgatattcggacatcagcgggcggtatcatgaaggtagcctttacagaagaagagaaacaagcactttgccggatgcagtatttgtctacatttgattggctggacgcaagcagcgtaaaaaaatgcatgcctcaaatggcagataacatcttaggagcaggtttgattaaagaggatgttcatgtcgaaccttatgcggtatgccgggcattttggcaggcggcggtaaggttcggggcagatgtgaaagaatgtacacccgtgatcgaagtgaagcgggagaaagaagcgttagcgattagaacaacgaagggaacattcacatgtgatgatctgactgtagcgagtggtgtatggtctggccgtttttttgaagagcttggattaactcattctctttatccagtaaagggggagtgtgtgtctgtatggaataatggtccagcactcgcgcacaccatttaccatgatcattgttatatcgttcaacgagatagcggcaaactggtcgttggtgcaacgatgaagccaaacgaatggcaggctgttccaacgcttggcggcatcgaagctgtgattcaaaaggcgtctcagcttatgccttcgatcaaggagatgccgattgatcagtgctgggctggtcttcgcccggcgacaagcgaccggcatccctacattggaagacacccagaagatcagcgtattctttttgctgcagggcattacagaaatggcattttacttgccccgattactggagagatcattcgcgacctgatattaggtgaaccggtcaaaaaggaatggcttcacgcgtttcgtattggccgaaaggaggcactgtttgtatgaaaattcaattgaatggcagaatcgttgatttcgatcaagagaatggaacgatctatgatctgctatcagcctatcagcttgaaaatagagtagtgatcgtggaaaagaaccaagaaattattgacaaagaagcgtttcaacaagtaaaaattcaatctaatgacacgattgaaatcgttcactttgtaggaggaggatgacaacatgctgcacattggcggaaaaacattcacatcaagattattacttggtacagggaagtatccatcatttgaagttcaaaaagaagccgtgaacgtatcagaagcagaaattttaacctttgctgtgagaagaatgaacattttcgaagcatctcagcctaattttttggagcagcttgatttatcaaaatatacgctgcttccgaatacagctggtgcaagtactgcggaagaggcagttcgtattgctcgtttagcgaaggcttctggactgtgtgacatgatcaaggtagaagtcattggctgctcaaggtctcttctgccagatccagtcgaaacgttaaaagcatctgaaaggctattggaagaagggtttatcgtgctgccatatacatctgatgatgtggtactggcgagaaaattagaagagctcggtgtccatgccatcatgccgggtgcttctccgattggttcagggcaaggcttactaaaccctctgaatctctcatttattattgagcaggcgaaggtgccggtgattattgatgctggtgtaggctctccaaaggatgcagcttatgcgatggagctaggggctgacgctgtattactgaacacagctgtgtctggtgcaaaggaccctgtgaaaatggcaaaagccatgaagctggcgattgaatcaggaagactaggcttcgaggcaggacggattcctttgaaaaactatgggacagcaagcagtccgcaggaaggaatgccggcattttgagcacacgttattcgcgccaagagctctttcagccaatcggcacagaggggcaaaagcggttaaaagactcaaaggctgtcattattggtgcaggggcacttggaacagccagtgctgaaatgctcgttcgtgctggcgttggatctgtcaccattttggatcgagattatattgaatggagcaaccttcagcgacagcagctttacacggagcaagatgtgcatgatcggctgccaaaggctgtggcggctgaaaaaagactcaagcaggtgaacagtgacgtacatgtcaaaggaattgtcatcgatgtgaccgctcaacatattgatgaacttgtcagcggggcttcgattatcgtggatgcagcggataattttgaggtgaggatgattgcaaatgatgctgctgtcaaacatcaaattccgttcctttacggagcctgtgtagccagctatggtattcaattcactgtgattcctggtgagacgccatgtttacactgcctgcttgaacatttacccgcacaaggcatgacctgtgatacagccggtatcattagtccagtggtgcagcaggtggcggcatatcaagtggcagatgcccttaaatatttaacaggccatcaagtgacgccaattttaagatcctttgatttatggaccaatgaacgatctgacatccgatcagccagttccttaaagaagaagcaatgtccaagctgtgggctgaagacatatccttttctctcctatgacaagagagcgaaggcagatgtactatgcggccgcaatacggtacaaatccgcagtgctgctgaaatcccgccgccattacacgaagtggctattcgcttaaagaaagcaggaatggatgtgcttgaaaatccgtatttactttcttgtcaaaaggatgaatataagcttgttttatttaaagatggcagagcacttgtacatggtacaaatgatatggccaaagcaagaaccatttatcatcaatggattggctaatgagaggtgtgatgaaatgacgatcaaaaaagcattcacaatcgcgggttctgatccgggcggtggagcaggcattcaagctgatttgaaaacctttcaggagctcggtgtgtacggaatgtctgcgatcacagcgattacagcacaaaacacacttggcgttcacggtatataccctctttcaatcgaggcgttaaaaagtcaaatagatgcagtcgcagaagacttgctgccagatgccgtcaaaacaggaatgctgtggagtgccgaaatgatcaatacggttgctgaaaaaacggttcaatatgagatgaagctgattgtcgatccagtcatgatcgcaaagggaggggcctctttattaaatgaagatgcggtctctgcgttgaaaacacacttgctgcctgtcagctatgccgtaacgccgaatcttcctgaggcagaagtgctgacaggcatgcgcattcagacaaaagaggatcgctatctagcagcggaacgtctatatgagcttggtacgaaacatgtcgtgatcaaagggggacacggcccctctggcggtatgataacagacctgttgtatgatggaaaaggctttatagaagtcacaaacgaacatattgataccccgcatacacatggcacaggctgcacgtttgcagcggcattaacagctgaaattgcgaaagggtactccatgagagaggcctttgaaacagcagaaacctttgtccatgaagccatcaaattccctttgaatattggagctggacatggacctaccaaccattttgcttatcagcaaaacaggctcaaacgataagagaatcgaaccgtcttcacttgcgagggcggttttttgatgaaaaagaaactttctttcagcggaaattgtcattctctcatgatctgtgataatattatgatcaggtactaatactatgtcttgaaaaaataggaggctttattacatatgaacttttctttagaaggccgtaatatcgtggtgatgggtgttgccaataaacgaagcatcgcttggggaattgcccgctcacttcacgaagctggagctcgtttgatttttacttatgttggagatcgtcttgctgaatctgtaaaagaacttgcaagcacacttgagcgtgatgattcaatcattcttccatgtgacgtgacaagtgacgaagaaatcgaaaaatgtttcgctacaattaaagaaaaagtacaagtcattcatggcgttgcgcatgcgattgcatttgcaaacaaggaagaacttgtcggtgaatacttaaacacgaaccgtgaaggtttccttttggcgcacaacattagtgcatactcattaacagctgtagcaaaagcagcacgtccattgatgacagaaggtggaagcattgtcacgcttacatacttaggcggagagcgtgtggtatctaactacaacgtaatgggtgtagcgaaagcagcacttgaagcaagtgtgaaatatttagcagctgatttaggcgcagaaggtatccgtgtgaacagtatttctgctggtccaattcgtacgctgtctgcaaaaggcatcagcggctttaatacaatcctgaaggatattgaagagcgtgcaccgcttcgccgtacaacgactcctgaagaagttggcgatacagctctattcttattcagtgatctatcacgcggcatgacaggtgagaatctgcatgttgattctggcttccatatcattgcccgctaaacgaatcattgaattgcagcataccaaagatgggtatgctgtttttttatttttcttctgatttgagacatccgctcatatatataaggaatgaatcattcgggagggattagtatgtcaaataaaggtgatgagaaccagaagccgcttatgtatattgttcagccgagctatgatgaatcaatgccggccatgcaaaatatcgtgagaaagcgaaagaaatcagaaaaaccgcaagaaagtcatcagagtgcaaaagacgtgatcgaagaaagtacgcacgaggaacccgtggctcaagaaatagagaagaaaaaagaagtcgggccgcctgaacttcagcaagaacaagacatcacacaagaagcagaacttgcacaagaacaagacatcacacaagaagcagaatttacacaagaacaagacatcacgcaagaagcagagcttacacaagaacaagacatcacacaagaaccagagcttacacaagaacaagacatcacacaagaaccagaacttatacaagaacgaaaaccccagcgagaagaggaaaagccgccagaaggtgtatttcatgaaacaaaagaagaacctagaagaaaacgagtgaaaaagcctttaagtcagatgagtattgacgaaaaagtcgattttctcacaagcctgcctcataatatgccaagagccctttgcctgattgaagctgatggtaaaacatatagaggaattatcatggatcgaaaagaagatctagtggtcattcgaacagcgggcgggggaaatccagttgaattagcaatagatgaaatttcctcgattcatccgcttggcttttaacgaataaaaaaagtcccatagagggactttttttgttagcagttacggttgatgagtcgtggatttaagcactcgattgcgcagaagcagtcaagatctacttcaatgcaatacttcgatttttctaatcggaacacatcacataaggaatctttatctgtaaaatctaaaatatgacggtctttgtcaaatgcaataagcaagctgagtgttgcgcagtgatcacagatgtgttcgactctgaaaaatgcagtgctgaagcaaggacctgcatctacttctccgacgtttccgaatgcgacgaatggttttgatttggatgtaaagagaacaaacgggacagtgtcacctaatgaatgggatgtagaaaggagattgctgtaacagctggtcgggcaatcttcttcgacggcactttgtaagtcgttaatattttcaacagcctctgctacacagctccatgaatgtttgcggctcatattcaaccctcctatactaggaaatttgtttgagtgtttgagcactgtcatcatctacaagcttttttgttttgccagttgatacatctactttcaatcaatgcggaagcggcagctcttatgctgactgctccgcatgattggctgtcattcgtaaggaaggggatgctttgactcatgacaagttaggtcaacggacgattggtttagccgtggtgatgatgctttttatctttcgatggcatgactctgtcgacaagctctgggtttaaacattggatcgcgcagaagcagtttagatcaacctcaatacaaaagtccgttttttctagaccaaagaagtcagggtcacaagggtgacacacgcttagcgtatgtccgtgtacatcaacaggtcttaatacagataacgtagcacagcagtcgtgtaatttttcaacccggaagaaaatggattcgaagcattggcaatcgtcaacaaatcctccaatgtttccgaaagtagaaaacaatccgccctttttatcaaaaattaaaaacggaattgtatcttttccagaaactgtcgggcttaataaattactgtagcagctcgtaggacatttatcttctacagcttcctgctctgctaaaatcttttcaaccgcatcgcatacacagttttcatcatgtcggccatggtgttttccgcagctcatggatttcagctcctttaacaaggtatttgactttagtccttaacaacatatgtatgcgccctctagttggtgtgggtaaatgactatttatatttgttgtatttttataaaaggaaaagcagagcttttcgctctgcttttggacattagaggataccaattgcaacgattgtcgcaacaagtgtttgagtaagtgtttgaatcgcgatcgagatatccgcatcgattgtcgatactgtaacgtttcttgaattttcgatgacaagtttctggcggtttgtttgtttgtgagtagcggcttgtaaaagatcttgtgtgacgcggtcagccagatcaccgtctgcgattgagatatttgtaatggtgatgatcgctgtttgaacagctacttggatagatgctgcaacctgtgcatcaacagaagagacgttaatgtcacaagagtctctgacgataatgacttcctcagatgtctgctttgtgaagcttacttgatcaaattcttgtaagacatcttcatcatcataatagtggccatcacaaactgcttttctttcatagttgtaatcgccgtggtgtccgtggtgtccgtggtgtgtacagttacgatctagagcgacccaagaatatggtttagaatccatttctattcctccttccgtttactttattaaatgctggaatgcgtggttttgtctcgggcatttaccctagcaggcaacccatttttatttaatcgttattacgctgcgcatcacggcgctgctgaatacgatctcgaagtgaatttcgttttggacgtacttttggttcaggctgtacttcttccggatgttttgctgcctcagcctgcctttttttctcctgctgctgttctacgaaatcatttgctttcttttgcaagtcctccactaatttcaaaatcattcttctttgatcatctgagatatttgctttctgatcatctgtgatattgtttttgtttaacacatcacttacaagaagactcgttaatggatcaacatcagtattgatttgaaactcctttttttcgttctcttcagccacgatgatttcacctctttcatacgtcatgttagaaaagaaagggtcaaagaatgccggcttcaactaagagtacattcaatgtttgagtgagaatttggacggagttcataatggatgcatctgataatgtaatcgtaatgttatagcagttgatgatttgaatcacagttttcttttggactgtcacttgttgtgtggataaaagctgatctgtgatgtctgcagccaattcatcgtctggtacaagaagttgaattaaaagagtaatgattgtcgttacggtcgcttgaagggagagtgcagctgttacatctgttttatgaattgtgacattttcggaatctttgatctcaatgaaatcatcataattgctgattaattcgtttaacagttgtgtgtataataaatcagcactttcttcaatagacaatactttcactcctttcttatctatacattatttaatgcagcagaggctcaaggtggaatcggaaagcgtgaaaaagtacaacccaattttatttccgctcgattcatcatggcggtctttctttttgcatatataaagaaaggacgcaaaaaagaagaaaaaaggaggtggaggctcctgagtggtgctttgtcatttgtcgtgtttgccctcgcatcctttagactgacgaggctgattgtgtttgataccattactgctcctttccgccgtttatttcatgaagaacaggaagaggtcaatgaacaaggtgaagtggagacatatatcatcattaaaggtaaagggctgcggtcttgggtaggagagctgttaagctgttattggtgtactggcatgtggtgcactgctgctttacttctgatatacatactatttcctgtcatcagcatgtggcttaatttactattagcaattgccgcggcagcaggcattattgaagcgatcgtctcaaagctggtgaaataaacaggcatactgatcagacacgctttcaaaaaatgcatatactatcatggaataggaaaggaagggttgcgatgaaaccaactgaaacaccgtcacatatgcttcaaggttatccagcgcagtcaaatcaacaatctgtttatacgaagaaaatcaaaaaagcagattgcggctgtggaaagaaaaagaaacctcaatagaacaaaaaacaaaagccggatttatccggtttttttgttgccctttttttgagtgatgcatatgtaagagagaaggggtgaccagaatggatgcattcgaacaattaatcggctccttgttcactaaacctcatgatggaaaagaacaagcgcacgaaaagggtgaaatggatctagcggataaagcgaatgatcttgagcagcacttaaaggtatttggcgagaagatggatgcttttgcgaaagaaacagaagcattcatgatgcgtcatggagaggcagattacgtctttaaacagcagaaataaaaattccgcacttttttatgtgatcgtccaaaccatttgtagtatttttcatattttgtaagggagaagaggaggtgcttatatatgagttgttacggttacggtggcggttcttgcggcggctacggcggaggttatggcggcggatatggatcaacatttgttcttgtcgtcgtgttgttcatccttctaatcatcgttggtgcttctttctttaactaaacagtaagaaggtgagggaagcaatgggggagccttttgctttcctttctctttgggcaaacaaggctttaggataggcacatatctcgcctattttcatatagtaaggtgattactccacaaagaggaggcaaatgaatggataataaattctttaaaagcgttgaaaataaaacgggtgtgaatatgaatgatgtttttaagcttgcaggttctttgcaaaatgccaactttaaagatgaagcaacggttcgaggcgtcattaaaaaagtagcgcagcttgcgaataagcgtgtacctaaagaaatggaagacaaaatcgttcaatcgattacaagtggaaaagaaaagcttgatttcaatacaatcgctaaaatgatgaacaacaaaaaataaacaacaggctctccgcttaaaggggggcctgttgtttttctgtgaataattctcggtttttctttagtaggggatacaaaaagcgcgagcgatgagcggtttttcctcgcctaaatgatggaacagatagataaagagattgttcagctcttgtcatggccacgtataataaacggcgttcttcttctagggcttcttcatcaccgtttcttagttcatcgagtgagaaatcatgaggcagtgctccgtcgaccacgcaagtgatgtacaccgtttggaattcaagtccctttgcgcggtgaatcgtcatgagctgaacacctggttcgtctgttttttccttttcggcagatttcatatgttcggcatgtgcgagaaaggcttcaatcgtttcaaagcgtttggcggcggtttttacatctcgtacatcatccgcccctttttcaagcacattcgtatcgttcactcgtttttttaagtaatcaccaagtcccatcttttgttcaataaacgtcacagcgtcagacggctttaacgttcgtaacgtgcggaacagaggaacaatggattgcagctttttccgttgaaacggctgaatatctgttagttttccgagtgcgtctaccattgaacaatcttccgtgatggtcagtgccttcatcgtgttcaaggactgctgctttaaaaagaaaaccggaagcagctgtttcatagcagccacatcatcggcatcctgacttaaagagagaaaggcgagaagaacccgaacaattcgtctgctgtagaaggctttgacaccagcctccgtctcatacggaatcgcggattgatgcagacgctcataaatcgcgcggcctcctgtattggtgcgaaagagtacgcagatatcattcggctttgcgccgtttttaattttctcctgaatatctgccacgatcatggtcgcttcctcttcctcgtcatatggataaaagagcgtaggcgggattgtctccgcacggacggcttttaacgttttttcataacgatgttgatttttcttaataatggcatccgcacttgcgacaatcgtatgatgcgaccggtaattcgcatgtaaatggacgatttgagccgaaggatagtcccgtttaaattcaagaatgaaagcaggatggctgcccctaaaggcataaatggcttgatcatcatcacctacacaaaatagctgctcagattctccagctaaaagctgaatcaattgatattgaactggattaatatcctgaaattcatccactaaaatatacttgaaccgttcttgatatcgtttcagcagttcaggctgttctgtcagcatgtgcaagcaggcgattgccatgtcatcaaagtcaaattgctgattgtctcgtttttgctgttcataagattgatagatcgtccacatgtgtttttccttttcatccttcaaaacaggaagctcgcctggtaaaaaagcatttttccaaaagccgatcgattgcagtacttgatcggtagggtagtctttttcatcaagtccttcatttatgatggctttccgaatgtactgttccttctgccagtcaaacttgatcaggtgctggccgttccatttgcttgcatcgtcatgaagcagcattttataaaaaagactgtggaaggtgcctgtcaccacttgacttgcttgtgatgggtgaagctggtattgcttgcgcagtctttctttcatttcactgctagcttttgtggtgaaagtcacgagtaagatatggtgagcaggaatatgatgatgtgacatgagatatgccgctctagctgtcaagactcttgtttttccgctgccagcgccagccagcaccagcattggaccttctttatgtgtgacagcttgaagctgcggtgtgctaaaggtaatatgcggaaagagctcgatggtatgtgcttgttcattctcttctaaatgtaacgcatcgctaaattgaatcgaccttggttcctgccagtcatatgattcattcgtttgcgagatgatctgtttacctgttggaaaacggaagcccccaagttctttataggaagcactttcctcttgctctgcattttttttctgatcttcttgttcttctgcttgttcacacatctcttgctgcgtcatatgtttatgaataaaggcaggttcttcatgtatatttaatctgaaaaagactggttgtccgcaatatgggcaggataagtgccctttttttccctcgtcatggaggaattgataatgttctctcgaatacgtatgtaatgagatcgttcgatcatgtcgtcgtgcgcatttcaaagctagtcctccaatagttaatcaatcttaaaaagaaacacatctaatcatatcaaatgagacgtgtttcaaacagtcataattagggaatagtagagtagaagagaagcaaaggaggcgttcttgatgggatatatagccccgattcagccggatctgtattttcaatatatcaatcgtcctgctcctcaggataaagaagactacgcgaaagtaacaaaggttactcgcacctttcatgacaaggtatacagagagctggagaaaaaagaggacttagtgacagaagcagaaacgaaagtacagcaaaaaaagcgggaacgttttgtacgagatatgtttatggaagaaggcaaaggcgttcatattaatgcgtatatataaatgattgcgctttctccccttgacgaacgatgataaagaaaagccagggcatcatggatgctctggctttttcttttggtcaaacagatagtgtttttgtcattttgacatgtgtgatccctgcttcttcaaacggttcagaaacggctttgtagcctttcttttcgtagaaaggaagagcttggacttgtgcgtgcataaccgcttccttcgctccattagcaatggcttctgtttccagcgcttctaatagtttatggccaaggccgaaagcgcgcgcctcttttaacacacaaattcgttccagctttgcctttggcccttcaatgatccgcagtctagcggctgcttgaggcttcatttcatcattataaatgacaaaatgaatggcctcgtcctctagttcatctatttcaatctctaacgggacttcttgttctttgacgaacacttcttttcgaacgtagtatgcatcttctcgttgtgtttgtgctgttgcgatgactgttttcaaatgtctttaaccctcttctcctaaaataaatgtttcatagacggtccaagatccgttctctaactgatataaaaggtggaagcgatccacggtttcttcatggtcaatttttctcagctttaatgtaccaagtacgtctgaatgctcatcatctgatagtttttgagctactgtcacatgcggaacaaaagcatattcaggtgtgccagcaagtggatctgcgtacaacctttcattgagcgccatgatttcctcgttcggttctactttcatataaatgacgttgtttacaggagcgaatgaactgaattttttaatacgtaacgtaataggagaagcattttttgcatactctcttaacgttgagacgacctcagccgcttctagatccgttaattcaaaaggtgttcttaatgttaaatgaggcggtataagtgcatagttcggatcataacgcttccggtaagagttcgcaatatcttgcaatttttttgatggaaatataacaactccgtatttcatcatgttccctcctgaataagaaagtatttattattgtttattataacaaaattcagttgattaacgaatatgggagcattttttttaacgaaggcgcaatgagcggctgccaaaacgtccatttatgatccccttcgaatgtctcaaataaataatccgcacctgactgttcaagaagcgcctttaaatcttcattcggctgaataaaatcaagcacttggccatctgtcgttttcacagccgtttcttccagcccaatttgatggataatggcataaggggaaagggctgtcgactgtttaacggcttctaggactgaatcatcaacgtaaggagactgcaaaatcagcccgccaaataaagaaggataatcaatcgctgtcataagggaaatcgtagcacctagcgaatcaccaataaacgtgcgtcctgagccaatttgataggttggatagtgcgtatcaatataagggacaagttcatttgctaaaaagcgtttatacgcttcaaactttgtgccatctggatgatacgtattccgtctttccgagacattttcataagggacaccaatgataatcgagcgttccatttctttgttttgcatcaattcttccgcctgtctgcctattttgcctaagcggaaataatcatgaccatcttgggcaatgatgacatgatatgtataaaggggggagtaattgactggcaaatagatcaaaagggtcatatccgccccaagttcttttgaatgtaaggtttcttcttgaataatgcctgttttcttcaccataatccattcctccagctaaccaatttcatcacaaagtgaaacgtttccattcattgtaacatgaaaaacagcgttgttcctatatgctaacatgcaatccattcagttgacatcgaatctgttataaaatacagaaaattttaattaattggtccgattcctcttgaaaaatgagatttaatgcgttacagtattaagaattagaacagacagacaacacattcttatcgtgagaggtggagggactggccctttgaaacctcagcaaccggtatgcatcacttcatgtgatgtaccaaggtgctaaatccagcaagcagcttttttgcttggaagataagaggaagcgattaaaccccttcttcttatgaagaaggggttttctgttttgaaatcagattttacttaggatggtgtcaaatgacagaacatgtggaaacgacattagcgcaaattggaaaccgcagcgaagaggcgactggcacggtcagtccccccgtttatctttcaacagcatacagacatagaggcataggggaatcaaccggatttgattacattcgaacgaaaaacccaacaaggcagcttgtagaggatgcgattgcttcactcgaagaagggacggccggctttgccttcagttcgggaatggctgcgatccaaacgatcatggcattatttgaaagcggagatgaactcatcgtctcatcagacctatatggcggtacataccgtttgtttgaaaacgaatggaaaaagtacggcttacggtttctttacgatgatttttcagatgaagactgtttacgttctaaaatcacgccaaacacaaaagcggtctttattgaaacgccgacaaatccacttatgcaggaagcagatattcaaaaaatagcaaagattgcaaaagaatatggcgctttggtcattgtcgataacaccttttacacacccgttttgcaaaagccgattacacttggagcggacattgtcatccatagcgcaaccaaatatttaggcggacacaatgacgtccttgccggtcttgtggtgacaaaaggagagcagctgtctgaagacatgttccagcatcaaaacgcaattggagccgttttatctccgtttgactcatggcttttaatgagaggaatgaaaacactggctcttagaatgcgccagcacgaggcaaatgcgaaggagctggcagagtttttaaagaaacagccagaaattcaagatgtcctttacccaggcaagggaggaatgctgtcattccgtgtagccaaggaggactgggtcaatccatttttgaagcagctgaaaacgatctgttttgctgaaagtcttggcggaatcgaaagctttattacgtatcctgcaacgcaaacgcatatggatatcccagaggagattcgcattgcaaatggcgtttgtaacaaactgctccgtttctccgttggcattgagcacgtagatgacctgaaagcagacctgaaacaggcactaacacaagtaagagaggaggtacacgccaaatgaccacacacgattggacactcgaaacccaactcgttcataatgcgtttaaaacagatcgttcaacaggtgcagtcagtgtgccaattcagcatgcatccacattccatcaaagcagcttcgatgaatttggtcaatatgactactcaagatcggggactcctacacgtcaagcgttagaggatacgattgcggcgctagaaggaggaacaagagggcttgcttttgcatcaggcatggcagccatttcaactgcttttctactattatcaaagggagatcatgtccttgtcacaagagatgtgtacggtggtacatttcgaatgatcacccaagttctttcgcgatttggcatcgagcatacctttgtggacatgacggatttgaatgaagtcaaaagaggcattcaatcgaatacaaaagtcatttacatggaaacaccgtcaaacccgactctaggtattacggatattgggagcgtcgtccagcttgccaaagaacatgactgtctgacattcttagataatacatttttaacgcctgctcttcagcgtccgctggatcttggcgttgacgtagtcctgcacagcgcaacgaaatttttgagcggtcacagtgatgtactgtcaggcttagctgtcgtgaaagacgagaagctgggagaagaactctattcgctgcaaaactccttcggtgcggtgcttggcgtgcaggattgctggcttgtgttaagagggttaaaaacccttcaggtcagattagaaaaagcaagccaaacggccttcgaactggcctcatttctcaaagagcatcctgcggtgaaaaaagtgtactatccaggcttagatgaccatccaggggcggacattcagcgaaagcaagcaagcggagcaggagctgttctttcatttgaattagaaaaccaagcagctgtcaaagaattggtggatgctgtcacattaccagtattcgccgtcagccttggcgccgtcgaatccattctgtcatacccagccaaaatgtcacatgccgctatgccaaaagaagaaagagaaaaaagagggattacagatggcctgcttcgattaagtgtaggggtcgaaaacggagaagacctcaaacgcgacttcaaacaagcactagaccaactaaagcctgttcttgtcaaccaatcataaaggagagaaaaaagccggtccggctgccggctttttgaccttttttgaataaaaccattgacgacgaatcatgatggttatataatagagactgtcagtaacagaaagcccagaactgatacataacccgattccgtagctcagctgggagagcgctaccttgacagggtagaggtcgctggttcgagcccagtcggaatcatcgtttaaacccttgcctagcaagggtttttttgttttttgcaggttgtttttttaggttaaaacgattaaagtgttctgcggtgttaaattctaatttgtttgtgacatgattataaatatctgagggtattttagcactagcatgtcctgctcttttttgaatagatgtaccccacctgtttgggatggggtatctgcatcaatacattcaatatttgtctggtgtaatttaaataaataaagttcgtttatcttaatatttaataatggttcttcctaaatgttgaccatttttaatggcttcaattttttcaggtaacgtattgagagtaatctcattgactagggtcgtttgggagatattccattcgtttgctatctcgttccaaatgactttgcgtttattgattggtacatttacagaatcgatccctagaaggttgatccctcttagaataaaaggtaacacagttgttgttaatttaattccgcctgcattcccgcacatgctcatgcttccaccataagaaatttgaggaatgatcacagaagccacatctcctcctacggtatctaagacgaagtcaaatttttgcttgtttaatggtttttttagctctcctaactcgtttgcaaaaatgacatcagctgctcctaaagattttgctatatcaacttgatgatctttacgcactaaagcaaaaatattgttgtacccaattttagataataattgtatagcaatgctaccaactccaccagttgaccctgtaacgagtatattaggttgatttttcgtactcataccattttcctgtaaagccatgatagaaagagctgcggtaaagcctgctgttccaaaaatcattgcttcttttaaagtcaagttatttggcaaaggaacaatccaatccgcaggtactctagcatattcagaaaaacctccagtgtggctcatgcccatagcgaaacctgtgacaatcacttgttgaccctctacgaaacgattatctgttgtatgaacgatagtcccacttagatcaattccaggaatcattggatagttacgaataacacctccatttttttgaacagccagcatatctttataattgattgaagaatatgctactttaattaatatttctccttcagataaatcattaacacttacattttgaagatcataactaacttgatcatttttttctgtaactagaatcgctttaaatgaatccattgtttatcttcctctctaaaaatatattacaacaaaatatttctggtgcaaaagtatttcaattaaaaaactaccatgatattataggtaaagtcaatgtgggggagataaaatggaattattagagtgcataaattttttactaagtgttagtcaaaataaagtgttcaagtactttagtaaacttttagaggaatgtgatttgacacccgctcaatatggtgtgttgaactgtctgtggagagagggtcagttatctcctaaacaaattggagaacttgtatatttagaagcctcaacagtttctggaattttagataaaatgcaaaaagctgacttaattgaacgcacaatagatccaaacaatcgaagaaatattttagtagaggctactcaaaaatctttagtcattagagatcaagttgaagcagcaacaattgaactgaacgagacagcgcttcaaaacttgtcaaatgatgataaggttgtactaaagaaagcattaagtacaattataaataattttcaatgatgtacttttataaacaagttccatattaaatcgataactatcacaaggctcctttacaggagcttttttcagtttcttttcggtgcgttgtaaatccttggatgtgataataaatataatattaagttttttatggaaattaggtaaggaatggacaaaattctttcttcagtggagaatattcaatgttgatggcagctattcagaatggttggcttgatgcaaatgttgtaattgaagaatcattaatgtcgttcaaacgcgccggatgcgatggcattttgacttattttgctttagatatggctcggcgactgagagatggagaatctcaaaacatataggcaaaatgaaaacagaccatgcagggtctgtttttttatgaggaattatttgaggaccttcagaaaaagtattgatggaagaaatcctttttcataccgatcacacatcttttaatagtatcagcatattcagtttaagaggttacttacaaaatatttagaactatcttgtaagaaccctcctaaatgtaatacggactttaaatattttctatttgtctatacttttcatatcgctgttggataagctcttctgaggataatggtgtcaatttttttagagatgattcgatcacagattcaatcatttgtgcctgtgatttgatatcattttgtgctccacctttcatttcaggaatgatttcatcaatcattcctaactgttttaaatcttttgctgaaattttcatatgttcagcagcttctggagcatacttagcgtctttccataggatagatgctgctccttctggcgaaattaccgagtaccatgaatactctaacatatggatatggttaccgacactaatgccaagagctccaccacttgatgcctctccaattacaatacaaacaattggcactttaagcgtagccatttcaaatagatttcgagctatcgcttcagaaattccacgttcttcagaccctttccctggataggcgcctattgtatcaataaatgtaataatagggcgattaaatttatcagcttgtttcatcagtcttagcgcttttctatatccttctggatgagccattccaaaatttctttctatattttcctttgtacttctacctctttgatgaccaataaccgtaacgggcattcctttaaattttgcaataccacctatcattgctttatcatcaccatataatcgatcaccatgaagttcgaaaaagtttgtaaacaataaaggtatataatccaatgtcgtgggccggttacgtagccttgcaatttgaactcgttgaaaagctgtaagattagaataaatttcatcttgcattttatttaaacgtttttctaataaatgaatttctgacgataaatctacattattttctttcatcattttctttaattcatcaaatttctcttttagttcaataataggacgttcaaaatccaaactcattttatcctccaaaggttatgatttacctcactctaatcaaaagacttagaaatagaatcaataaataattcaaaaccatccacaactattttttgttctgattctgataaattattgaggatacgttgataaaatgtaagggattgttctcttaagcgattaacagtaatgtgacccttttctgtgaggtgcagaaaaagttctcttctatttttttcatttacttcacgataaacaagtcccttttttactaacttatctaccaatctacttacagttgaagtatctagtctaagtttattggatagttgccaaacagttaatctttccacctctagttcctctaacgccatcatttgagaagttggtagaggtttttcaaatggtccattcggcaaattttgagattcgaaaaccccagttaatataatcattttcttaatatctgttcttagttttaaggcatcttctcttttcaaaaggtcaacctcctacaattcatgtatcatacattaattgtattatacatcaatgtggttttttcacaagcttaacataagccaatatgacaacatggacgagatatttcttcttgttaaatgtgtctaatttgtgaaattaacaatttccacaaactaaaatatatggaagttcagtctatagtaggtaacataatactcattgttatggcgggtatctagtctcgtaaaagtgacaagactaatcattttgaatgaatagaaggaggtttcatgaatattgccataactgatgttacatacggtagtaaagtaagagagccaaaaggtgctctgcgttactactatacacatgccttagaaatcgaaaattctaaggaagagcttctcatccaaatggactttacagataagctctctaaaaaaaattacacggaggtaataggaaatgagaattaaccacaatatcgcagcacttaacacattaaaccgtttatcagcaaacaacggtgcgagccaaaagaacatggagaaactatcttctggtcttaaaattaaccgtgcaggagatgacgcagcaggtctagcaatctctgaaaaaatgcgtggacaaatccgcggattagaaatggcttctaaaaacgcccaagacggtatctctcttatccaaacagctgaaggtgcattgactgaaactcactccatccttcaacgtgttcgtgaactagtcgttcaagctggaaatactggtacacagcaaggtgaagacttagctgcaattaaagatgagatcacagcgcttgttgaagaggtcgatggtatttctaatcgtactgagtttaacggaaaaaaattattaaatggtacgtttaatggagtaggcacaccagaagttccgccgacagatccagatgatccaagtacaggtacaccagcaactgatggcgatgctttagtattccaaattggtgcaaatgctacacaacaaattaaggtaaacattcaagatatgagcgctgctgctttaggcgttacagacaacgatggtgcagttgagacaggtaagtctgttaaagatatcgatgtatctaaatttaaaacaattgcagctgatgacgatggtggatttgatgatcagttagcaatcgttgatggagctattaaacaagtttctgcacaacgttctaaacttggtgcagttcaaaaccgtctagagcacacaatcaacaaccttggtgcttctggtgaaaacttaacggctgctgaatctcgtattcgtgacgttgacatggcaaaagaaatgagtgaattcactaagaacaatattctttctcaagcgtctcaagcgatgcttgcacaagcgaatcaacagccacaaaacgtacttcaattattacgttaataaatcaaaagcccctatatataggggctttttttgtttgtctttattcggttcgatgtcttattttatagatcgttctaaaagacgcttcaacgccaatgaatacgacaaataataatactatccaactaaccaaatattcgagagagtcttttgtatttctcagtgttggtcattatcctgttttcacaaacagggagctacataaagcagctcactgacaagtaatcaatctttcttttttttgtagtcttttattaagcttgaaacagttaaacccattacaccaaaagctactacataaaataaaatatttgttacaggtgtatcaatttttcctaaaatcaacacaatagcgataatagcggcgggtaaagtaattaacaaacctttggatgccttattttcctgtgtcactaaccaagcacctccttgttgttttccatttaggtgtgttttagttcattttaaaaaacgaacaacatgatggttttagcaacccaccatgctgcattttcacttccagtcactttaagagcgcctaagtaaataccatgttcaagagcgcctgtatagtgttcgagagtgattagaatggtttctaaccctgttacaccgcctatcattactttcagtttagttggtaattggtcataagctccttttattgcttttatagccgaagtgaatttaccgtgtaaagtagcttctccgtatgtttttgactgagcttcttttattacttttttgaactttactgtttcttcttcatttagattccaatactgtgcaatctcatctattgtaggctcttttgattgttcaaaagaaaattttacagatgaataagaaaaggactgttctttttcgagagctttagtaacatttgcttctgcaaaaggtgtgaatataaaaacagaaattcctgcaactgttgataagattaaacctttagaagaacttagtttttccataataaactcctacttttgaatatattttagacattaggctttcaaggaatgtaaggcttatttagtaatgcaatattttgttttagctgttagaaatattcctcctactctaatgaatgttatcatttgtaaataaaagaagtaaataggttatttgttataaggtttgaacggtacaatatgtatgcatattgatgaaaaacatgattaacaaagaatcaacaaagattaagaataaagaggtaacatttttagttcttaaaaaacgaaggaataccggaggataaaaagcttctgtagtaacggtagaagtgaattagagggtgtcactggtaatgacagaattctatacctctaccttgactgggtagaggtgacagttcgatccagcttaattagagaccatcgtaaagaacccttcttgttaaagattaaagaagcaataagtaaaaaatatgaaactattttatttcctcatccatcactttcttatatttttcaaattcagaatccttcatttctccgttcatttgaagcaggaagttcccttttgaatatgtgtgagagaagaacatagatccagcattgcccaactcatcataataagatttggcctggttaaggtcagtttcatttccaaatttaaaaatccttccaccagcattttcacctaaagaaggaatgagaatcctttttccttcttctcttatatttccaaactctttttgttcaagatcagttggtttttctgcttcaagtccagcacttttgaacgcttcaatcacgttgtctgttgtgagctgttttttagtagatgctgcattgctacaagctgttaacaataataaacatgtaaaaaataatacaaaatatttcttcatagtcgatcctcctgattgatagatgcataaggatcttacactaagtaatttctgtttactatcctttcgacaaaagtagacaaatgtgaaaaaataaaggaagggtaaaatgataacgttcaggtgaatatatatttgataaaatatttagcgagggtagaaagatatgaagtcatttttactaattggacaatcaaatatggcggggcgcggcttcaaacatgaagtgcctccgatttataatgaaagaatcatgatgctgcgaaatggtagatggcaaatgatgactgaacccattcattttgataggctggtagctggcgtaggactagctgcttcctttgcggagtcttggtgtatggatcatgaaggagaaaagattggccttattccttgtgcagagggtggcagttccattgacgagtggtcgcaggatggagcattatttcgtcatgctataagtgaagctaaatttgcaaaggaaaatagcgaattggtcgggatattatggcatcaaggagaaagcgacagccaagatgggaaatacaaagaatactatgaaaaaataataagattatttcatgaactaagaactgaattatctgtacctaacattccgcttgtaataggaggcttgggcgatttcttgggaaaaacagcatttggcgcagggtgtgtggaatatcaactgatgaatgaagaactaaaaaaatatgcacatcatcatgaaaattgttattatgttactgccaaaggccttgcacctaacccagacggaattcacatcaatgcgatgtctcagagaatatttggtataagatattatgaagcatttcgaaaaaaagaacatatacatgaaccattaccaaatgaatatgagttagtgaatgaatgtcataatagaatgaatacctcagcggagaaaacatatatagcactagaaaaattcacgttgggcaagatgacttacgaagagttgttgaaggttttatcgtaggctcaagtgatagactgaaacataatatatctcttgaaaggatgattgtggtggtgaaaacagataaagtctcctcctgaatacagtaaatcacattcaggaggagataaaaatgtttaaacaaatagatgaaaattatccgagaaaagagcactttcatcattatatgaaggtaacccgatgctcatatagcctggtgatcaatctagacatcacgaaattgcatgcaatattaaaagaaaaaaagctaaaagtatatcctgtgcaaatttatttgttagcaagagctgtgcaaaaaataccggagtttcggatggatctagtaaacaatgaacttggtcattgggaacttctccatcctagttatacgattctaaataaagaaacaaagacattttcaagtatttggacgccttatgacgaaaactttgctcagttttataaaagctgtgtaacggacattgaaacttatagtgaaagtaacaaactatttccgaaacctaatatgccagagaacatgttcaatatttcaagtctaccttggattgattttacttcttttaaccttaatgtatctacagatgaaacttacttgctgccaatatttacgttaggtcaatttaagatgaaaggagaaaaaatcaccctgcccgtttcgattcaagtacatcatgctgtttgcgacggctatcatgtcggtctatatgtggaatatttgagatggcttatagaacattgtgaagagtggttaagcgagtcattgtatatttagttttcaaaaggtgtagtcatttgatttttagaaaaaggcaaactttgtagagtctgcttttttgttgtgtgaaaaaaatgtgtaaaatcactttatgttactcaactgttctttttgcggtttcttttcggtgatttgtaaactcatacatgtgataataaatgtaatataagggaaattagtggaaggggaataagggatggagaaagttctttcttcacatgttggtgtgaaaataaatgaatggtataaaatgattcggcaattcagcgttccagatgcagagatattgaaatctgaggtagaacgagaaattgaacggatggaagaggatcaagatctgctcatttattatcaattaatgtgttttcgacatcagcttatgctcgattatattaaaccttcagaaaaacgatcgccttctgtttctgatttggttgataaaatcgaaaattcaaatcatcaactttctggtatgctgcaatactataatgctttttttagaggaatgtatgagtttagtaaaaaagaatacatacaggctatccaatattataagatcgctgaaaggcagctcgcattggttgttgatgatattgagcaagcagagtttcacttcaaggtggctgaagcctactatattatgaaacaaactcatgtttctatgcatcatattataaaggccttagacatctataagcagcatgaacaatataaagttcgccaaatacaaagcttgattgttattgcaggaaattatgatgatttcaagcgatatgacaagtcattagagcatctaaatacagctttttctatagcagaagagctcgccgataatatgttaattgctaaaattctattgaacatagcgaatacatatgatcgacaacaaaagtacactgaagcaatcatacgctacagagaagttttagacattattacaccacgaagtattgatataaaaccaatcaccctatttagtttaagttggtcgttgtataagtctagtcaacatgatgaagccgctccactcgtagaagatggtcttaagtgctccttagagagaaatgattcgttgtgtttgatgttatttaaagctttaaaagcgatttatatagatggtaatgagaaagcaattcaagaagtgctagattattttgaggaaaagcaactatatgtctatgtcgaggcatttgctcaaagtataggattatcttctgaaaaaaagggggactttgaaaaagctgccgaatattatagaaaggctcttaaagctcaaaatgatattcaaaaaggagagtgtctgtatgattattaaaaaattactagtcattgtatccattgtattgttaagtgtttcaacagcagaaactttgaaaatcattggaacaaaatcaattcggaatacaacaatggaggaacaacaaaaatcaaatcgaaacacgactatgattgatcgaaatacaacctctgaaaacgtatagacaagattaaaacagactttaatagtctgtttttttatgaagtagaatgagcaaatgaacagttggtcaatgttatacttatctcaatagatatagggaggcacccactttgaagccattttgggagaaagaagaagagagtcctttcacgttagaaaaggtagatgaggaaaaaattcgtgaagcagaaggaagacttggcgtcactttacctgatacatataaaaagctcattttagattggaacggtggttttacagttcgtaatgcttttccaaccgaacggccaaattcttgggcagaggatcatgttcaatttgaccatctaagaggaatcgcaaaaggtgttggaattatgaacagtccccagttaagtgatgaattggatctgcctgagggacttgtgatcatcagcggagaagaagatacatggatcgcaatggattatcgaaaaacgaaggaacatcctcctattcactatttcgatttagagctggaagtagattttaagctggcagatactttcgatgattttattgggcagttatatacagctgaagatgcgatggtcgaagtagtagagattgaggaggaagcttcggatttatatgtcagtaaagaagagcttgaacacatatttgataggcaggaccttcgtcagcagaatctattcaaaatggcacattatccgatggaagaaacagaagagatcgaatggtttttcaatcgtgtgaaacaatgcatccaacagataaacgatcaacatgttttgtatgaagcagcgacaacgattcactccatccttctgttaaacccggatatgccaaggaatgaccgtatcaatcaagagttgaaagaaatagcggagtttctagaaaatagtggtgagcctaataccgcttttttgggagaagacattcatccagtgaaaaaacgatagtgaaagaataaaagcccctgaaaagggcttttaaaatgtagtttaagacctctttttatttaaagttttcatgatgaataatgctatatatgaagcaatgaatgagcctaaagtgtaaacaactgaccaccctaagaaagagccattaaaaagtgtaaatgtcaggatgagcaaaatgataaagctcacaactggcatgaaataaaccttttgtacaaacaatgtgacgataaaagaagcaatgatcgtacttactggaagcaagccgaatacgaattctaaatgagtcataccaattctccctttaaatgacttagctacatttgatttgttctagttgcctctcatacactcaaaattcatagtacatcgggtttttgagtttaataaatttattagacaaaagaatcaataaccatatcataacataagtaaatgcatttattacattatatgtaattcgatgggaagtcggatgattttaaatccttttttttgtaatcttattgaaagtcatatttaaataaagtatagtaactttatatgacaaagaggaggatggttaaagatgatgcatgcaggaagattacgccagcaaactttgaacaatcaataatttcatatgttcaaaggctctgttttcatcaaacagagtaaacggggtagtctgcacatttttaaacatcttcagcggtcaagtatgtaactttacttgaagacagacagatatcgtttctgtctttttttgtaattttttattgatataaagagagatatgagtctagccgtgtttactctagccacagatagcagcctatttgtggtttttttgatgattttcttaacgcctgttgatcatgaataaatgagcaattggaggaaaagaatatgaatagactagatttaaagcaattagccaatcatcacggattagagattttagagaataccatcaaaataaatgaatcaggtgttgatttccgtgtcgcacatgtcgaagatttacatggtgatcaatggatattaagagtgcctcgcagacctgaatcaatgaaacataccttacaagaaaaaaagacattagatcatattagtaagcaggttcaatttcaggtccctcagtggtctatctttacagaaagtctgattgcttataaacaattagagggggtaccggcggcaagtattgatgtggagaagcaatcatatgtgtggagttttgaccaaacgaatgtaccgcaagcctattacgaatcattaggaagagttttagcgaatgtacattccttagatcaacagccttttaaaacgctcggtgtggagatgctcagtgctcatgaattaagagaatcaatgaaacagcgaatggaacgtgtcaaatcgcaatacaccattaacagcggtttatgggagcgctggcaagcatggctagcaaaagattctttatggccgcctttcgtgggggtgaagcatggagatttacatcctggccacattctgattgatgaaaatcaatgtgttacgggtgtgattgattggtctgaagtgggggttggtgatgtatctgcagactttttgtcgcatcaacttctctttgggaaagaaggattaacaaaacttatccatgcgtatgaaaaagcaggcgggagaacttggccaggaatggatgaacatataatagaactactgactacaagtgcgatcactgtggccgagtacgcacagagatcaggtttgaaagatatgcatgaaactgcagcatacatgttggcaaacgaaagctaatcaatcaggacgaatccaaaaaaaagcccctaaaaagggctttttttaatctaattcatgaaaaaactgtttgagttgatcaatgaaaacggattttgattttccttttttataaatgaactcgatattgatattgaaattgatggatggatcgattgaaatttgttttaatgttccttgttctacctcatttctaacacaatgatgaggaagaaacgatagtcccattccttaaagcactaaattttttgcggtttccatataatcaacctcaatggaaatgttcggtgtgatgttgtttttttgaaataatcggtggagcatcaaccaatcaaatgatccatagtcaaagaaaataaaaggctgttcttctagttctttcatattgatgttgtcatggctggcgagcgggtgatgagttgggacgaacagcccgattggatcgctgaaaatagggattgattcaatttgaggatgtgtttcagttctgacaatcccaaagtctacttggttgttaatcacttttttgacaacatcctttgaatgtcctgttacgattttcactttcaggttttcgtatttttcttttagtgcgggtaatatgttaggcaatagattattggaaatagaggatgcgcatccaatcgtcaattcataagggatcatcgtttgtttgagactatgctttgcttcttgataagaatggaggatctttttggcatgcgggtaaaactgttcacctttttccgtcagagatagtttatttctctgtctatcaaataatttcaggtctaattctttttctaacgattgaatacgtgccgaaacagaaggctgggttaaatacagtgcttccgcagctttattgatactgcctagctggcatacataaataaacacttctatattctcaatattcattttatccccttatattacgttctttaaatgtttagcttttcaagctcatacactaattttacagcttctttcgccaaaatgacagtagggtcaatcactttcacatctttagttgaccttagtactaaggggatttctgtacagccggcaatgatggcttctgctccttgattgattaaaatttctgcagctaacgccaattcactttcgcctttacttaattttcctgctttcaccgcatatatcccattcatcacgtttttctgaagattttcactaggaatcatgacgtcaatcttgtgatgagcacaagccttttgatagagctgggtttttaatgttccatcagtacatagtaagcccacagatgtatattgatgtttgttcaggtaatttgcggtttctaatggcatattcataatagggatatgggtggaatgttgtacattttctaaaaagaagtgagcggtattgcatgcaatgagaataaagtccgctcttgcacgttctaatctcttagctgatgcaatcatatcatctgtaggatcttcgcttttcccaaatatggcattggttctatcagggatttgaggataattatcagcaatcacatggatatgatcctgatcttttatcgctggtgtatgagaaatgatttttttcatcagatcaatcgttgctaaaggactcatcccgcccataattccgatcgttgtaaacatatacgccaccacatttcttttttttctattataaaaaaataaagcatggtgagcgttatagaaaagttctatatgtatatagaaggtttatcaagagcgtcttttaatagcacttagcggccctctctgattgaaattggcgaataacaacccggtgtgtccttgtaaatatgctgtttgcactcatgtttaacctcactttttagtttgtttttgatttgaaaaagtctatcagccattcagatagctgctgctgtgctttactgacaaatcgatctgcataataagttaattccaagtgacgaacaggcgccggatcagcaataggaatcgaaacaatatttggccacgtcgaatggtattgcagcaaccctcgcggctgaatggttgcaccgatgccggcttcaaccagctgcaataatgaagatgcggacccaacttccatgacggtgtccagttcaacaccctgttctttacatacgtcatctactaaatcccttcctagatatcccttcggatacataaccaaggcatgctgcgtcagctcttccaatgtcacttcactcttttgggctagatcactttctgaatgaacaaataattcgtagggctcacttccaagtggaatttgaacgagacgcttatccgcaggcccacgcagcccgatgccgagatccactttatgcgacagtacttcttcacgaacgaagatcgttgaatatgctttcagattggtttcgggataaagtgttttaaattctacaaatagcggaacaagctgaaagtcaagatcggaggggagtactgcaagtcgaacgtttcctcgtttttcagataacagttctttcatcgcattttttgcatctctttcagcttgaagcattttcataccatattgataaagcagagaacccgcttcagttgcaacgacttttttaccgattcgatcaaagagcggcatcccaacttctgcttcaagcagccgaatctgttggcttaatgtaggctgtgatatccctaattgctcagcagcttttgtgaaatgtaaatgatcgaatacagccatgaaatatgtaatatgccgagtatccatttgtcatcctttcataattaatagttttttactatcatcataatacgaattattgtattgatcaatgaatgcggcagatttatactcaaagtaacttcaacaagatgagagaggaagaagagcattgatgaaaaaaatattttatttagccgctttatttttagctgctctaaacttgcgcccaatcattacgtccgtggcttctatgatgagcatgatccaaacagaccttggtgtcagtgcactgacagcaagtcttctaaccactttaccggtcttgtgcatgggggtgtttgcacctgtagcaactaaactaagccgccgttttggtttagagagaaccctctttttctcgattcttctcatcacaatcgctactggactacgtgggacgagtcaaacggttgccatccttctcatcactgcatttgcaggaggagttgggattagctttgcaggacctttgttgtctagttttatcaaaaagtatttcccgaaaaatccggggattgtgagtgtctattctatttcgatgacaataggggcagcacttgcttccggcttcaccattccgatttaccttcgcagtgagcatagccttccgttcgccttatcttgctgggcggttttagggatcatcgcattgatcttgtggctagggctggctcggaaaaaacaacaggctgatcatgcagttttaccgctaaggctaccgctgcgaaacaaaaaagccattcaattcaccttgttctttggctttatgtccagtatgttctattcgataacagcatggatttcacccatcgcccttagttttggaaatagtccacagtatgccgccatgctgctaacgatatttacactgattcagattccggtggcactactcgttccaggagtcgtcactcgcttaggaaaaccgaaattatttctgattttatgcagcgtgtcagagctgatcggccttattttccttctacttccaatgcctattttgccagccgtcatttttctagggattggggcaggtggattatttcccttagcacttatgctgcccattattgagacgcgtacaccggaggaggctggtacatggtccgctatgtcgcagatgggcggatacatcatgggcgggtttggtccgtttttcattggcttggttttcgatctaagcggacattttcaagcttccattgtcgcaatgctcgtcattgtctcattgatgattggtgttcagttatcaatgaaattaggtagaaaagaggaagaagtgtcgagttaaatcatgctgcttcacatttcaatcaaaacggggaggttttattgcttaagaaggggagcctgggtagagatactgggtgcttgtttatgatggaacgtaaggaatgtcttcatttttcgcagccgtttttatagcttttctttattgagtttgcgcaataatggaatatttcacaaaataatagagtcacctaaaggaggcaagtattgtctctcttttgttgttttaggagtaaacaccagtgatcctttcatttaaccagaaatgctattgcttttttgctcgattaagagtttgattataatagagactgtaaaacagaaggcgatagaataattcagtatcatgagctccagttatttttgcaagatatgttccgagaaaaatttgcataaaaagaactagaggtgaataatatgacaagctatgagtcgaaagacattttaaagcaagcaatcatgaagacgtacaatcaatacgatgaagaattcaatatgattccagaagaaatgaaagatgatcgaatagaggatgtaagccgaactcctgcagaaaatttggcctatcaagttggttggacaaccctgctgcttcaatgggagcaacacgaaactgaaggaaaggttgtccatacgccagcagaaggttataaatggaatcagcttggcacattatattctctttttaatgagaagtatgcctgccaatcactagtcgcattaagagctcagctcaaacagaatgttttaactatttgtgatatgttggatcgtatgagtgaagaagaagtgtttgaacctcatcaacgaaaatgggcggatgatgcgacagcaaaggctgtttggccagtttataaatttattcatgtgaataccgttgctccttttaaaaatttccgtactcaaattcgtaaatggaaacgattaaaacaagtatgacgtgaaggatatacgatgtacatatttcgttagaactaaacttgattgtatcatcttattttagagagaacagggggcgctgattcgagcccagttattccttcttatcaaaattacgatcactcacatggcttctttacaggagctttttttcttatttttgcggtttcttttcggtgtcggacgattcataaaatgataatatatgtcattatagggaaaatagagggaggggtaaggacggatggagaaagtgctttcttctcacgtcggcttgaaaatcaatgaatggtattatcatattcaaagatttaacgtaccggacgccgaggcatataaagaagaaatcaaatcaatgcttgatcatatggaagagaatcaggatttattattgtatttctcacttatggagttcagacataaattaatgcttgattacttgaatcctttagaaaatggaaaagagcgggcgaactttagggaactcgcaatgaagatcaaaagggatcaagagaaattaacaggattgctcgagtattacttcaattttttctacggcatgtacgaatttgaaaactacgaatacctcaatgcgattaccttctataagcgggcagaaaaaaagctgtctcttgtcagcgacgatattgaacgtgccgagttcaattacaagatggcagaaatctattaccacatgaaacaaacccatatgtcgatgcaccatatcgcacaggcaatagaatgttatcgagaaaaagatacatacacagtaagagaaatccaatgttcttttgtcattggattaaactatatagatatgggctgccccgaaaaagcaataccccattttcaacacgcactagaaaaagccgccgacaactcaacaaaacgattaaaaggatcagcactttataatttagggttgagttattttcataacaaagaattagcacaagcgattattcactttaatgactcgattagtgcatttagagagcagggatacgagcatttaaatagaatcttagatccgctcattatgttgtcaaaagcctacttcaaaatgaaagaacaggatttaggtacatacgctttaaataacggaatagaactatctgaaaagctgaaagatcatgttctattattgatattcaagtttttaagatccctatacattgacaacaattttgagcagttggaaaaaataatggaattgttagaaataaagtcaatgtatcctgacctagaagatttagcaaaagatgctgcaaaatattataatgagatgggagataaagacaatgcgatgcatttctatgaaaagattctttatttccaaactcaagtgaagcggggggactgtcagtatgaaatttaaaacgttatcagtagtattcgtgatgattagtgtcataagtgttgttagttattttacgtcagaagtgacagcaagtcatgatgaagctaggagaggtcatactgcaagtattggttatactgcttaagtaaaaagccctttaagggctttttactataaaacggaatatatgctatgaataaagaatattttttccatagaaaacatactgaggaggaagtaaaatgacaatgttaaaatcaacattatttcgaaggattttcattatattttttgctttaacctttatgattagtctgttcaatatggctgtgtttccagggacgccagcgtcttattatgttggcctgatttgtaagatgttgtttatcagtttgttaaatggtctatttttcggaacaattatctatttgattgtcacccttctctttgctaaatcttcaaaggaaaattaataaacaagtgagcggctaaagaccgttcttttttatttttaaaaattggacatgctattttaagagaaaatgagatgacttaatttatgatctaaatcgcaattcctgtaaatgtttttccatcatacattcaattatttttaataacttactgcattatattttaaagggtgttaccgttggatgtaaggaatgattggccaatcttccaataagagttggagggaaatcatgaattgcaaaattgaaatattaagcaatatgaagatggtgtatatgaggaatataggaccgtatggaagcaaaatgaatatagaaatgatgaagcattttaaaaaatggatcaataaacatcaattaaatgatgaattaaagaaacatggcatatacggggttcctcaagatgatcctgcaaggactttacctgaaaaatgcagatatgacctcatgatcatgacaaatagagatttctctaatgatcaaatggttcagactggtcattttgaagggggaaagtatgctgtttttacaatgaggcatacaactgaaaaagtgaatttgttttggagtcaattacctgactatattcagaacaatcaattgaacatgcgtcaggcacctactatagagcgatatagagaagaggaaggcgaagataaggtgtgtgaattcttactgcctatcttttaaacactttatcgaaattcaatgggaaagcagacctttatggtctgtttttctgcatatcagatttacattcttaaatcatcttgcttcaaatgctatactatggctaaaccattcatgaaggggcatgataggaggagcattgtgtgatattcatcataggcattgtcattgcttttatgattgctattttaggttttactgttttcgtagaagtaggaaatggactgggaacggctctcagcatcatcggaggactggtcattttattcatagccggtagattacaaagacgaaaagaacagaatgatcccaacatattattagataagatgatgatgttttttcacgaagatggatttcaggcatctacatatatcttttcagagcaagttgataagggatttgcgattgatgatgagttaaataaaatgcgctttattgaacatcaacctggcggatcatctagaaaatatagatttgcagtcactgagctttccttgaaagatttgaaacaagttgagatattagaagatggtgtgccgattattgattattcagctgagagtgatgataaagaagaggtctcgatgcttgaattaaggttaacaatgaatgaccaagaatcatccacgattacaatcaacttcctgcaatttgatgtgcctggtcgtaagagcaatgctcaatacttaactgaacgggaaaatttgcatgagatttatcatgatattgatgcaatgatgaaatctgctaatcaccgctcatagagaagaaatcacagtttgatgtggtttcttttttttatgtgtacccaagaaaagctggtccggtcattgtagttgaatgtttttctcaaaaatgaataaagatagactagacgcgaaagcgaacatggagatagaaagaactctcatgtgatgaggaggaaaaataaatgaaaaagctatgcagggaagtttggatcgaagtcaaccttgacgcgattaaaagaaatatcggggccattcaagcgcatattccgaggaaaagtaagatcatggctgtcgtgaaggcgaatgcttatggacacggttcagtggaggtagcgcgtcaggcactggagagcggtgcgacggagctcgcagttgctagcttggaagaaggcattgtattgaggagagcaaaaattgaagcaccgattctggtccttggatttacgccgcttgactgtgtgaaaagggctgcagcctggagaattgacctttcaggccttcgtgaagactggattgttcaagcaaatgagatcttagcggaagaagaaagtcagcgtcggcttgggattcatgtcaatgtcgacacaggtatggggcgattaggtgtacgaacgaaggaagagctgttaagagtggtggaagcccttgaaaagagtgaaaaccttagatgggatgggatttttacgcatttttccactgcagatgagcctgaccctgattttacgcagctgcagcacagcatttttattgattttcttcgttttttgaaaaaacaaggaattaagctgccgaccgtacatatgaacaatacagcggctgccatcgcgtttcctgaatttagcgccgatatgattcgactaggcatcgggctatatgggctgtatccttcgcaatacattgaaagcttagacgctgttcagctagagcccgctctcagtttaaaagcaaggattgcgttcgtgaaggaaatggtgacagagccaaggaccgtcagctatggtgcaacgtatgtagcaaaacctgatgaaatcattgccaccataccgatcggttacgcagatgggtactcacgtgctttatcaaatcggggatttatgcttttccgcggaaaacgaatgccgattgctggccgagtcacaatggatatgacgatgatcagtttaggagaaatgaaagcaaagcaaggcgaggaagtggtcatttacggccgtcaaaaggacggagaaatttctgtcgatgaaatcgccgaaatgctcaatacgatcaactacgaagtcatcgccaccttaagccgccgcgttcctaggttttatcgtcgaggcgggaagattattaaaatatcgacgccggtgatgtatgtgtgagagtaaataacaggtgcaatttgaggatatttgttctggtgtacaatgataaaaattaaattttattacaaatatgtcgataaaaggagggatatttaagatatggaggaaagaaacgatgaaaaaaggtttatttttagtgcttttgactatttttatgatggtcacaattcatccgttaaaagctcatgcagctgagacaaatgggtggacgaagcgagcagacttaccggaagagcgaatcggagcaagtgtaggagtggttgacgggaaaatatatgtattcggtggagcaagtcaacagtctaaattcaacaattcaacatatatgtatgatcctaaaattgatttgtggtcagaaaaaacaagtatgcctagattaagaacaggagctacctacgcaacagtaggtaaaaaaatctatgtcattggcggccttactgatacaactaaaacagttcacaaaaccatcgatgtttatgatacagaactagatcaatggacagaagaaccaattaagatgcctgagaaatttatatatacatcatatataactggttccttaagagcagttacagttggagaaaaaatttatatagtagcatctttatcaagctctcaagtaaatttttattcctatgatacggtaagtggagagtgggaaagtttagataattctcaattagcttctcgtcagggtagaagtatttcagagataaatggaaagttatatattgctggtggtgaggctaacgttagccgagcgaatgataaagatatattagaatatgatatgacgctagggaagtggcaacggttaaaggatgttcagttaaattcttttgcatatgaagctgcttatgcgacatacaatcataaattatttttgattggcggtcagcaaattggagatagatcaagtaagttattaaaacaagttcagatatttgatccacaaactagacaagtccaagattctttatatgaaattcctgaaggtagagttggatctgtagcagttattactgatgatcaattatatgtcattggtggaagagattatgctgagtcaattggtagtcattctgtcaaaaacacttttaaatctgttatctcaattccattaaaagatctgcaaaaagtcactaaggatcaggatgaaacaaaaccagatgatggttcagcagaagaaccaaaagatcaggatggaacaaagcctggtgatgggtcaaccgaagaaccgaaagatcaggatggaacgaagcctggtgatgggtcaaccgaagaaccaaaagatcaggatggaacaaaacctggtgaagaagcaacaaaaggtatactttcaattaccatgataaacgggctgcaaaaggattatttgctttcaatgaaagaaatcaacgattttctaaactggtataaagagagaagctttggaattggtatgaacttctatgaaatcaatgatgaacataataaaggaccattcactagtaagaaagattacgtggtgtaccaaaatatcttaatgtttgatatcaagcaatactgatattcataaaattgtaaagctgctgatgatagatcagcagcttttgtttttataggattgttaaaattaggattaacgtcatgagaaaaatgcgatatttttttaaaaaactgctaaacatcctataacaacatccgataatagaattgtcagggttgataagccctagaataaaggacttttttcagacaaggacgtctgtcaggtcccacatacatggaggtaataggaaatgagaattaaccacaatatcgcagcacttaacacattgaaccgtttgtctgcaaacaacggtgcgagccaaaagaacatggagaaactttcttctggtcttaaaatcaaccgtgcaggagatgacgcagcaggtcttgcaatctctgaaaaaatgcgtggacaaatccgcggattagaaatggcttctaaaaacgcacaagacggtatctctcttatccaaacagctgaaggtgcattaactgaaacacatgcaatccttcaacgtgtgcgtgaattaactgttcaagcaggtaacactggtacacaagatgatacagaccttggtgcaattcaagaagaaatcaaagctttagttgaagaagtcggtggcgaaactggaagtaaaggtattgctgatcgtactcaattcaacggtaaagaccttttagatggttcttttgctagtggtacagctgatttagtattccaaattggagctaacggtggccaacaactgactgtaaacattgacagcatgaaagcagctgatttaggaagtgcgacagttaaaattagtaatattgatgtaactaattttgcaactacatcttttgatgaccaacttgctggaattgatgaagctatcaaccaagtatcagctcaacgttctaaacttggtgcggtccaaaaccgtctagagcacacaatcaacaaccttggtgcttctggtgaaaacttaacagctgctgagtctcgtatccgtgacgttgacatggcgaaagaaatgagtgaattcacaaagaacaacattctttctcaagcttcacaagcaatgcttgcacaagcgaaccaacagccacaaaacgtacttcaattactacgttaatgaagagccccttttatggggcttttttttatgctgtttttttcttctcattttctccagtcttatgattcttaaatccctctgataaatcatgaaaaatgacctttaaatttggcatactctagcgaaacgatcataatgaatgagacttattccttatttattccttttttgttaaacaaattccatcagtgttcgataaatggattgtaaggcttacaaaaattctaatttagaacttttggacaaggatgttcaattggttcaaacacatggaggtaataggaaatgagaattaaccacaatatcgcagcacttaacacactgaatcgtttgtctgcaaacaatggagcagggcaaaagaacatggagaagctgtcttctggtcttcgcatcaaccgtgcaggagatgacgcagcaggtctagcaatctctgaaaaaatgcgtggacaaatccgcggattagaaatggcatctaaaaacgcacaagatggtatctctcttattcaaacagctgaaggtgcattaacagaaacacatgcgattcttcaacgtatgcgtgaactaactgttcaagcgggtaacgttggtactcaacaaacagaagatttaacagcgattcaagaagaactcactgctttggtggatgaaattgatgggatttcacagcgtacagcatttaacggaaagaatctgttggatggtagcgtagaagatggattccaatttcaaattggcgcaaacattgagcaaaatatcaacgtacagatcggcaaaatggacgctgaaaccttgactgtcaaagatattaaagtgaatgaagatggttttgactttgacgtcgaagtagcaaaaattgatgaagcaatcggcgcagtatctaaacaacgttcagcacttggtgcagtacaaaaccgtctagagcatacaatcaacaaccttggtgcttctgctgaaaacttaacagctgctgagtctcgtattcgtgacgtggacatggcgaaagaaatgagtgagttcacaaagaacaacattctttctcaagcgtctcaagcgatgctagctcaagcaaaccaacagccgcaaaacgtacttcaattattacgttaatgataaagccccatgaaggggctttttttgtttcaatctaatgaaagtaagtgctgcaaacgaaagtcaggaaccgcttcatggaaaaaagctcgattgtcttcatcatcctctttatcccactgactccaccattcagcagtttctccagaggcgtcggattgaatcatgtcatgcagctgttctaagttgataacattgataaaacttttgcagcgaacattcccgtcataccgccgccaatgacgatcgcccgttcatatgtcatggattgtgtcacaacatgcgcctccagtaaatatataaaatggttacatgaccatttcatcatatgttgattcttaaattatagcaaatttacgttttattgaatatagagagggaatctccttctttttactcgtacatatgagaaataactttaaacatcatcattatttttaaaaaataactattattttaagaaggacgaccgataaataacataagggggtagagaaattggatatactacagagtattgtgacagcagcaccttatatgatgcagattttaaaaaatgaagtgacgatgggtatcattgaccgagagaaatttttgctgtatttgccatcgaaagatgttgattttcaaattcgagctggtgaacatattaaagcagatgatctgaatatgaaaaaagcgctgagaggtgagacatcaagtatgtttgtacctgaatcagtgtatggagtaccattaaatgcaatgggattgccaatttatgatgaaaatgggcaagtgattggtgccctcgctttaggatttccgctcaaaaatcaaatagagcttgaagcatatatggagtcattaaatgacatcattcaaagtattcaagaaaaggtgcacgtggtggcggcacattcagaggagctttctgctacaagtgaggagatgaccttacaaacgcagcaaacactagaaagctcgaaacaaacagccgatattacaaaaatgattaaaggcatctcgaaacaaacgagtttgctaggattgaatgcgtcaattgaagcggccagggcaggaaaagagggagctggttttagtgttgtagcaagtgaggttcaaaagctttcaagtgaaacttcacgtgcaacagaaaacatcgaaagctcattgcaagggatttcctccaatatacatacattacttgagagtatgggccatatgaaaggttcttcatctgaacaggctttacttgtgacggagtttagcgaaattgtggaacgattgacgatcgtaagtaaagaaatgaaagaattcatgcagcatgtgatgtcaacgtaaaaaacgaatccaagagggattcgtttttttgatgcgctattttctcttgttctgatcaaagcgataatcatacgtgtcgcccttcaccacatttaaaaactcatgtccaatttgaacaagctgtccgtttttccatttgatgagagggtctttgtcagggtatttccagtaaatcgtcttcttacggtgggtcagtttgttttcaatttctgctctaactgcgttttcctttagctttcctccgctatgctgataggtgttgatgatgtacattccgtcaggtgatgacatcgagcggatgaatgttccgtgagacacgccttgaagagagaagcatttccaataaataatgccagcgaagctaaggagtaagatgataaggatgagggtggttttcttttttaacatgaaaaattcctccagatgtagatcacaatatttctaatttatgagagagaatacaaaaagattcatatagtccaaaagttctattcatttcaattatcggtcattttttctcaaaattcaacagaaagccgtaaatgtaaggaaaatttaaggaagaattcaagtggtgtatttgattcgaaacctctttacaaaagaataagggatcagtagacttatgctcatatagagaaatggggcagatgacatgagacaaatcatcgatacgtatcaaagttatgaagagctttccgctcatgaaagaataggaattgattatcgaattcttcacgagcggaaaggtgaccagcttctggttttgtcgcctcatgccggaggaattgaatccggcgtgagtgagctcattcatgaaatatctagtgattattctatgtatttatttgaaggccttaaagtaaaaggcaatcatgttcttcatattacaagtacacgttttgatgagccggtttgcctttcacaggtgcatacccatcattatacgtttgcactccatggttacggagaaacagaggtgcttcaaacgttagtgggaggtacggacagagaaagagcggcagaaactgtgaaacgtttaacgctaaatggctttcacgcattgcttctatctgaatctgatcgtttttctggaacacatcctgataatattaataaccaatgtctgacgggaaaaagtgtacaacttgaaattagtcaggcgcaaagaagagcattttttcaagactttaggcgtcgctaccggcgtgatacacaaactgaacaattttatcggtacacaaatgtactcaaacaagtattagccctttatgaataaactattatcgttttatgtgatgatttacgtttgataaacagcttctttttctgcgaccttttctgctttcattaaataagacgtaaactcctgttgaaagcgaatgcctgcttttcgctgttcgaataaggcaagccgcttttcagcaaaagctctggtgacgtgaaacgtttgagcaatatgcaaaatggcttgctgccgaagggttggaagcttcatttgcagcagcataaaggttggaacacaaaagtgatacatgaattgttttgcctgaaactcctgcagttctcgaaaaagtttgttcattttgaaatgattgcctgtatgctttagcacatgacaaagctcgtgggcaaaatcctgccattgttcttcaggtgatagggatctgtttaagataatactgtaaagaccttgatgttggatcatcatgctgccagtctcctcgtagtggacccatacatgaaattcagaagcgatcctttgcatctctctataagcaggaccgcttatttgcaattgagcatataaccgcttaatatcttcttctaaatgggttaaaaaaccagtcatttaaaaaacctccatacaaacgtatgttctatttttggcgtaaaagaaaagtccatataggactaaatagctaattgagctattacttactttttatatcggcttatttttaacaattttaacataaattcaaggaaaaatggaagtaattcctgtttttttctgtatttttgcactttccactactaaaaagagtgattgaattcaaattttaccatagtcttctcatgaaaacaaacaagtattgtcttacgaacgccaccgattgatgagaaagatcaattcaatctagcaaaagggagtgcagaacatggtacaaatttatcaagattttattccagttggaaacggaaaccgcccaggatatgcgatgacaccggagtatgtgacggtgcataacacagcaaacacgtcaaagggagcggatgcgaaaagtcatgcggcctatgtaaaacgcccagcgacagaggtgagctggcattttacagtggatgatcatgaaatctttcagcatctgccgttaaatgaaaatggctggcatgcaggggatggacatgggaatggtaaccggaagtcgatcggaattgaaatttgtgagaatgaagatggaaattttcagcaagcggtcaaacatgcacaatggcttattcaaaagctattaaaagaacatcacattccgctagcaaacgtggtcacacatcagtactggtctggaaaagcatgtccacgccagcttctttctacatgggatgaatttaaaaaagggattgaaacggcagaagatccggagccggtcatcacgtatgtcgtgaaaagcggagatacgttaacgagtattgcgaaagctcatggggtcacagttcaagatttacagaagtggaatgacattagtgatccgaataagattcaaattggacaggttctcaaaatttatcgtaacgatgcaaagagcacgtatgagctgccagatggggttttaaaggtgacgtctccattgacaaagggagagcacgtacgcctcgtccaacaggcgcttgctgctgtttatttttatcctgataaagcagctgcaaataaaggaatagacggagtttacggagaaaaaacggcgaacgccgtagcgcgttttcagctggtaaatggtctgacaagtgatggggtatacggacctaaaacgaaggaaaaacttctgaagctgttaagtaagtgagtgtttctgtttgtatgattggatgactgcttcactttgctcatttaatcgacgcatataaggcgacgacttatattcagcaaactgaacatatctcaattgtttgattttctttttcatttattggcacctcaatcgttgcaacgtatagattattgtatgcaagtctatgtaaaaatggaagcaggacgcggatgttgttccgcgtcctttagtgtaatcaagcccttttatttttatactcatccaatagctgttcattctttttaaaaatacgctctgtatggggacttaccttgtaatccgccatactgatatgttgctttttctttaaaatcttaaaagggtttttcttgcgattgttgttatccccttgaagtgcgtggtccatcttcatcaccttcctcttcgtcaggcaagattaggtcataaattgttgtaagtgacgtcattaataaatagtcgaactcagtgacaatgtcatcagaggtaagcttaatgacgaagtgatcatctgctacagaaaacgggatgagcaccaatttgccgaaatcatcgtaatagacttcctgcctgtcaagcttcgcctgaataagagctcgctggtcaagtgtccgcagcaggtcatctttttgttcctgcgtatcgtatggacaaagaaccgcttgaatattcatcttgtcggcaaaagaataaatgagccgttcaattccctctatatatgcctctacacttccataatatacatggatcggttcgtttttcaataggtattggtacgtttttagtttgttgaggtaagaatgaagtagatcgttattttgttctaggagttggtgggtgtcggtttctagttcgtgatttccgagttttttaatataggagctgagaaagatgaatgcatcggttaatgcaaaaaaaacagcaataatcaagtagtgcatccaatcggtgaagattgaagaagggtcatttgtccagtacacaacagcaccagctacataaatccaataccacgtttttcgaatggcaaacatcttttcttttactttttgttcaaaacgccatacggcaaatacatatacagcaagggcacctagcaataaccacacggtcaattgaaaaaataatagcatgttcttctctcccatagacagatggatacttatttatttctatggatatgattggaaaccctgcttcatgaaaaaaaggcttgtaggaacaaggtgttgaagtgtgcgggcaaataaaaaaagacctgtcagacaggtctttgatattagataatcgcatttaacacaaagtatataagagcccctagagttcctgaaatcggtaatgtgatcacccaagtgacaagcatgcgttttgccgtaccccagtttactccttttactctgtgtgcagaacctacacctagaatagaagatgagatcacgtgagtggtactaacaggtaagtgaataaatgtcgcaccgaagataattgctgcacccgttaaatcggcagatactccgtttactggacgaattttcataattttaccgccgactgttttaataatcttccagccgccaatagaagtacctagtcccattgcaagcgcacaagagaattgtacccagaaaggaatgtcgtctgttgtatgcaaattacctgcaattaaagccatcgtaataattcccatcgctttttgcgcatcgtttgttccgtgggtatacgattgcagtgcagcagttaaaatttgaacacgtcggaattgtttatttgtttttgcgagattgttgtttctgaatacaaatttgataatggtatacacgatatatcccaatacgaaagctaggataggtgaaagcaatagtgcttgaatgattttaatgaatcccgaatagtttaaagcgccaaaaccagcagaggcaataacagctcctgcaattgatccgatcagtgcatgtgaagaactactcggaatcccgtaataccaagtaagcaagttccaagtaatggccgcaattaaagcagccaaaatgacaacagaaccgttttgaagtgtaaaaggatctgcgatgtcttttgtgatggactttgccacacctgtaaatgtcattgctcctaagaagttcatgaacgctgccataataatagcatgtctaggctttaacgcctttgttgaaaccgaagtggcaatggcatttgctgtatcgtgaaatccgttgatgaaatcaaaagcaagtgcacaaatgacaataaatatggtaaggatgagtaatgtgtccatgtttaactaaccccgttacgcattcttcataatgattgtttctagattgttggcaacactttgacaggaatcagcgatttcttcaagtgtttcgtaaatttctttgtattgaatgaccttgattggatcagtttcttttccaaacaagttctttagtgatttacgataaagattgtcacaattatgctcgatctctttgattttgattgcgtgtggttgaatatcttttaagcgattttcagccagtaaatcaattgtaattaaaatttcctttgcacattctctgatgtagtggctgaatttgtcgatatgttcgtcagagcttgtcattgaataaatttccattgtcgctgaaaaatgctcaattccatctaaaacatcgtcgaggctattcgtcaattgaagaatgtcttcacgttcaatcggtgtaataaaggctttgttcagctctttaatcatagtatgaacatgattatcaccttttgtctcatattccttcaatgtgtcagaaaattctttcagagtggtttgatttgttactttatagctaacaaaatactcagcagtttcatctaaatttttagcaatttccgttaacaagacggaaaacttgtcttttttcctttttaacatgtaaaaaccctccattgtataaatgagacaatgcacacatcaaataattatatattcttttgtcgaaaaaaaacaggtgtagtcgaaaatttcttcactttttctatttgatcttattctgacctaaagatgtgttctcaacacacctttttcagaaaggagaaaagaaatgaaaaaagcggtccatttttggcgccgcttaaagcttaagaagctgaataaacaagtttaaatcgctcgcaaacaaggagcatgtcttctttaaattctaatccgtacggtttgagtgcttctgtaaaaaattcttgatgggctctgtaccaatagttatatgaaagatcgccttcaccttctgcttgtgcaaatgattctggaacctcattcattggcatgacatctacatgcgtgatctctatgatggcttttggttcgtcatggctgtccaaaatgaccgcatattgtcctgcctttggaagcggctcctgttccttttcgtaaaaaaggtgtccagaacaagtcgctgtttttttccctcgcagaataaggtcaagcaaatgatctgggtctgctccaaatgcccaagcggaaacagacgcgtcaattggtgcactttctgatttttcttcccaatatgtttcccaaaataaggtgcttttctgattcatcattcttccccctttgtgatgtgtttattataccgtgaaatcaaatacatggaagtatagtgtctttatccctactgagtaagtatgtcatatgttttgaaaatctgctttataattgatgaatataggatgatagaatgaaaattttagaaattttagaataatctattgtattctggtcaagaagtcggtaaggtcaaagtaagaatatggaaggggtgttgtgtatgaaacgcatttctctaactattttgtccatatgtctgttggttttctcgttttttctgcctgtcagtcaggtcactgcaaccgaaactcatgggaataaagtagctgttgggaaagatggcatggtggctactgcccatccgctcgcatcagaagtgggggcagatgtattaaagaaaggtggaaacgctgttgacgctgctgttgccatccagtacgcactgaatgtgacagagccaatgatgtctggaattggcggcggaggatttatgatggtttatgatgggaagactaaagaaacatccatcatcaatagtcgagaaagagcaccacaaggcgcaacaccagacatgtttttaacagatgagggggaagtcatcccgttcgctgagcgatccacacacggtaatgctgttggtgttccagggactgtaaaaggtcttgaggcggcattagataagtgggggacccgctcgatgaaggaattgattaagccttccattcagcttgcagaggatggatttgaaatcgattctgtcctggcaaaagccattgatgatcatcaaggaaaattgaaaaaaacggccgcagcgccaatctttcttccagatgatcagccgctcaaagaaggggacctcctagttcagccaggtcttgcaaaaacatttaagctcattgcgaaaaaaggaagcaaagcattttatgaaggaaaagtagcaaaggcacttgcaaatacagtccaagattttggcggaacgatgacaactgatgacattgatcgttatgaggtcaagactgacaagcctatctggggagactataaaggatatcagcttgcaagtatgcctccaccaagctcaggcggggtgtttatgctgcaaatgctcaaaatacttgatcactttaacctatctcaatatgaccccaaatcattcgaaaaatatcagctgcttgctgaaacgatgcatctctcctatgctgaccgtgctgcatatgccggcgaccccgaattcgtagatgttccactaaaaggactattagacgatgattacatttcagaaagagcctctcttattgaattagatcaaatgaatcgtaacccgaaagaaggagatccatgggcgtatgaggatgaaaaaaccccatcccctattgtcccgcagccagaagataaaaccattggtgagaccacacattttactgttgccgatcagtggggaaatgttgtgtcattcacaacaaccattgaacagttatttggtacagggattctcgtcccggaatatggatttttcttaaacaatgaactaacagattttgatgcaagacctggcggagcaaatgaagttcagccgaataaacgtccattatccagtatgacaccgaccatcatattcaaagataacgagcctgtcatgacagtaggttcaccgggaggaacgaccatcattgcttctgtttcacaaaccatattgaatttgcttgaatatgacatggagcttcaggatgcagttgaagaaccaaggatttatacaaacagcccaacttcttatcgttatgaagtaggtgtccctctcgatgtgagaacaaagcttaatgatatggggcatcgttttggcaactcgcctattgatataggaaatgttcaagctctactcattgatcgaaaagcaggaacctttactggagtggctgactcctcgagaaacgggactgctgttggcgtcaatttaaagctctctgcccaataagaacatttcccgggaaaagaagcgcctcttgaggatggcgtttcttttttgtctaaatataaggaaaacagtagaaaactgggaatagtttgaatcatacatagctgatcagacaaccgaaggctcttggccatttgaagtacaggactgtgatgtatttcaatggctaagggccttttttgcgtatgaatgacaaggttgttgctgacatcaaagagcaattacatgagcttttagagagaggaagtcacatttaataagaagtagagcatagttgaagaaaggtgcaaaaaagactgcatctttttttataaaatttttcctaggaacattgacttataatttagaatattataatatctttacaaaggtaacaacattgaacatttttcggtaattatatttgtaagcgctttataaaaggttctattccaaaatgttctttctttttgttacatgtgttcatatttatgccaaatgaaaggggtggttgtttgaacaacttgtttgagttagatgaacagctgatcaagctgcagtacgatgcatcttcgagagaggaggtgaccacatatttagcggagcgattagaagcgggaggatatattaagtcgagctttttaccagcggtacttgaaagagaaaaaacatatcctacgggccttccacttgcgacctttggggtagcaattccacatacagatcctgagcatgtgaacaaacctgcgattagtgtagccactttaaaggaacctgttatctttcacaagatggggagccctgatgaaactgtgctagccaaaattgtgttcgtcctagcaatctctgaacctagtaagcagctcgtgatgttagagaagctcatgacactttttagaaaagaagaggtgatgacgaggctgtctcacatgacatcgtatgaagaagcggttgccgtgcttgagcaagaattaaaccaatagcctttcacaaaaataatgtaagcgctttatctgagaaatccaggaggtggatgtatgatcaagcaagttgtcgattttatattagaccttgggccaactattatgcttccgattattatgacgattttcggtatgattttaaggcaaggctttaagaaatccttccgagccggtattacgatcggaattggatttgtcggcgtcaaccttgtcattaatttgcttgtgagcggccttgggccagcagcaaaagccatggttaattcccttgggctaaagctcgatattttggatgttggatggccgattggagctgctatatcctttggtacacccgttgcccctttgatgattcctcttgtgcttttgttaaatgtcatcttattgtccgttaactttacgaaaacgctgaatgtggatatttggaacttctggcatttgattttcgcagcctccgtgacttactacgcttatcataatatgttcttggcccttgctgttggtttaatcgtctctgctatcacgcttaaattagccgattggacggcaccgacaatcgaacaccattttggattaaaaggcgtatcgatggctcatgctgaaacggtcaacttcgcgccgcttatgtatgcgtccaaccgtatcattgacaagatccctggcttaaacaaaattcatgctgatccagaaacattgaagaaacgttttggcatttttggcgaaccgcttgtgatgggtctcatacttggtatcattattggtcttctaggcggctatgatgcgaaaggcgtcatgacgcttggtattcaaatggcagcagttcttgtactaatgccaagaatggttgcgttattaatggaaggtcttattccaatctctgagggcgctcgttcttatattcaaaagcgtttccctgggaaaaatgtctatattggtttagatacagcgattgtgattggtcatccggcgaatatggcggtagcccttctcatggtgccgattacgattttacttgctgtcgttctgccttacaatggcatgctcccgtttgcagacttatcggttcttccatttacagttgtttgggcagtagcagccgctcgtggaaatattattcgcggtcttattaacagcatttttacattgatgattgtcttctttatcgcaacgaatctcgcaccgcttgcgacaacaatggggaaagcagtcggctttgatttcccagaaggggccaacatgatttcaggtattgaccttggttcccacgtcattccttggatcatggtgagacttcttgatccgagcaacccgtactttattgcagccatcatctgtgctctggcttatgcgcttctatggtactgggtgcgaaatgatattaaaaagcagtatgcgaaagaaatgggcttagatcagaaagaacaataaacgagctggagggattctcatggcaaagaaaatattggtttcatgcggaacggcagttgccacatcgacggttgttgcaaagaaggtcgaagagacgttaaaggaaaaaggatatgatgtcgtggtggaacagtgtaaggcatctgaagtcccgcaaaaagcggagggcgccgatttaatcgtgacgaccacgccagtgagtgacacaaaaggaacgcctgtgattcaaacattatcctttttaaccggatttggcattgaagatgatattgaaaaaatcatagatcatattaagtaaacactcattccattgaggagctttcgcggctccttccatttacctgaaaggaggacgtctcatgcagcatcatgcttatagccgaacgtctgcagtgttgtctatttttcttccagccgtgctcatctgtctgtttttcctctggtctctttatacgttaatgtcagcaggacctgagccgttagctgtgttaggcgtttatacgctgcctatcctcatgctttctagtattactggactgaaccagccgacaaacgtcatcattagtgaagataagctgaaaatcggagcttttggcagatggcacacatatgcggtctctgatattaaaggaaagctttttatcaagccgtatcctcatatcgggaaagtctatgtcagggtgggcccatcgcgcatattcggaggacgttactggatatccagtgagatgagtgagtacaagcagcttgtgcaaacgttgcaggattttgcgaagggtgatgaaaaggaggatgcagctacatgaaatcagctgtcttttattcttcagagaacattcggtatgaggagcggaaccggcctgcgattggtgatgatgaagtgctattaagaatgcgtgcctgcggcttatgcggcacggatatttacaaggcaacacatgagacggtaccctctggaacggtgctagggcacgaaatcgctggtgatattgttgaaaccggaaagcatgtgacaaatatccgaacgggagacagggtttatgttgcgcaccatgtaccttgctttacctgtgacttttgtcaaaagggattttatacaatgtgtccgcagttttcagccactaatgtagatccaggcggattttcagagtatatccgcgtacctgcattgcatgtcaagcacacaatgggtaagctcccgaaggacgtctcatatgagcaaggggcaatggtggagccagtcgcctgctgtctccacgggtttgaacgagcacctgttcatccaggagattctgtgctgatccttggagcagggcaaattggctgtatccaactacagctcgccaaacattacttggctggaaaagtgatgataacggatgtgaatgagaaccggctgctgcaagcgagaaatttaggtgcagatgttgcttttcatccagcctctgagccggtggaagaccgggtcatgagagaaacaaatggaaagggagcagacctcgtcatgatatctgttgggagcagtgcgcttttaaaagaagcgtttcaagcggtagcgagaggtggaacgattttagtgtttgctcattttccaaagggagacgtctccattccggctgatcggtttttccatgatgaagtgaaagtcgtaggagcctattcctcgcatccttatcactatcgtgaagcccttgagcttctaagggcaaaagtagtcaacacagaaaatatggtgacgcaccgttatccgttaagtcagctgcttcaggcgatagaatgtgcaaggcaccctgaaggagaaagtgtcaaaatcatgatgtatccagatgaatgagaacatgggagattggaagagaaagagaagttctttagaaaagggcttgcctttctcttttttctgacaaaaaatgaaaacgcttaaaaatgaaagagaattgcttgacttcaatgatacttaaacgtatgataattacaaatgtaacatataagaacaaatgtaaaggggagagaagaaatgcaaaaacaaatcactttgcctgaacagattagtcatgagagattagcagatttatataaacaaatgtggttagtgagatattttgatgaaaaggtcgatcaattctttgccaaaggacttatccatggaaccactcacttatgtgtcggacaggaagcgtcagctgttggatcaattgccgtcttaaagaatgaagataagatcgtcagcacacaccgtggacatggtcactgtattgcaaaaggtgcagaggtcaataaaatgatggcagaactattcggacgtgagactggctattgcaaaggaaaaggcggctcgatgcatattgctgatttagaaaaagggaaccttggcgcaaatggaatcgttggcggcggtatcccgctggcaacaggcgcggcacttacatctaaaatgaaacaggaaggctttgttgttctttgtttcttcggagatggtgccacaaatgaaggcagctttcacgaagcgctaaatcttgcatccatttgggatctgcctgttgtgttcatttgtgaaaacaaccagtacggcatgtctggccctgtaaaagaaatgatcaacattgaagacatttcaacaagagcagaaagctacggaataccaggaaaatcgattgatggaaatgacatggtcgagattatgaacacagtagatgaagcagtcagacgcgcaagagctggagaaggtccatcacttattgaaatgaaaacgtatcgctggaagggtcactctaagagtgatgcgaaaaaataccgtacacgtgaagaagaaacagagtggagacaaaaagacggaatcaaacgctttaagtctctcttgattgaactgaatgttttgacagaagagcaggcagcggttttacaggaagaagcgaaacaggaaattgaagcgtctgttgaattcgccaaaaacagtaaagaaccgtcaatcgatacactattagaggatgtatacgcctaattaggaggggaatcacgtgacaaaaacaacagtgagagagatttcatatttagaagccgttcgagaggctatgagtcaggaaatgagagagaaccaagatgtattcattttaggtgaggatatcggcgtatatggcggcgcttttggggtcacgcgcggcatgattgaagaattcggtccagagcgtgtacgtaatacaccgatctcagaggcagccatcgcaggaggcgcagtcggagcggctttgaccggtatgcgtccgattttagaacttcaattctctgactttattacaatcgcgatggatcagcttgtaaaccaagcggccaaaacacgatacatgtttggcggaaaaggaaaagtgccgctcgttgtgagaacaccagcaggatcagggacgggtgccgcagcgcagcattcacaaagcttagaagcgtggatggctcatattccgggactaaaggtggttcagccttcaacagcttatgatgccaaaggacttttaaaagcagcaatggatgatgacaaccctgtcattttctacgagcataagcttttatataaaacaatcggcgaagtgcctgaagagccttattcgattcctttagggaaagctgatgtgaaaagaagcgggaaggacgtcacgattgtagcaacagcgattatggtacacaaagcgttagaagcggcgaaggaactagaagcagagggaatcgatgttgaaatcattgatccaagaacactcgtcccattagatgaagaaaccataatcgaatctgtgaagaaaacaggtaaatgtatcgtggttcatgaggcggtcaaacgaggcggctacggcggagagattgcaagtatgatagcggaaagtgaagcgtttgactacttagatgcgccgattaaacgacttggcggtcttgcagtcccaataccatacaacccgacactggaaaaagcggtcattccacaagtaccagatattattgaagcagcaaaagagcttgtacgctcttaaataaaggggagaagatcatgccaaaagagatatttatgccgaagttaagcagtacgatggagatcggaaccttgcttcaatggtttaaagaagaaggagattcggttgaaatcggtgagcctctttttgaaattatgacagacaagatcaacatcgaggtggaagcctatgatgacggcatttttctaaagaaatactacgaagctgatgatcaaattccagttaatgctgttattggatatatcggagaggcaaatgaacaggtaccaagcgagccgccagcacaggcagatgaagattcctcagaaagcagcgaatcgtcttcaccagacacagcttcatccagttctactgaagccccaaaaacatctgatgaaaaagtacgtgccacgcccgcagcgagaaaaacggcaaaggatcatcatgtggcgattcaagaggtatctggcacagggccaaaaggcagagtccaaaagcgggacgtcgaggcagtcgttcattctagcgagaaagaccagcgcgtctcaccgcttgcagaaaaagtcgctgctcgtgaaggaatcgatttagcagcagtttctggatctggcgctcatggcaaaatcatgaagagtgatgtaaaagcagcagcacaaacagcagaggcttcgcctgtgaaaacacaaaaactagctgggatgagaaaagtgattgctgatcgcatgtcacaaagtgcctttacagcaccgcacgtcacattaacaagtgaaattgatatgacgaaagcaaaagaagtgcgtcagcagctactaccagcgattgaaaaagagacaggctaccgattgtcgtttacagaaatcatcattcatgcggtcagccatgtactcacgcgccacccgcatatcaatatgacatttgaacaaaatgagctccatttccatgaagatgtacacattggtctcgctgttgcggtgaaagacggcttgatggtaccagtcatttctcatgcgaatcaaaaaggattaaaacaactgacaaaagaagcgaaagaaattggcaaaaacgcacgtgatcaaaaactgctgccagaccagctgaaagggtccacttttacgattagtaacttaggcatgtatgccattgatacttttaccccgattattaatcagccagaagtggcaattttaggtgtaggacgcattcaagataaacctgttgtggtagatggagagattcaggtgcggccaatgatgggtgtcagtttatcgtttgatcaccgagtcgtagatggcgcaccagcggctgcctttttaacagaccttaaaaaagtgcttgaacaaccatttgaattgctaatgtaggagatgaatcggatgacgaaaacgtatgatctgacagtcattggcggaggacctggcgggtatactgccgcccttcaagcagctgagcgcggacggaaggttgctttgattgaagaggattttttaggcggtacttgtttaaatcgaggctgtatcccttcaaagaccctgctgaaacatgcagaagtgattgaatccattgaaaaggcgaaaagctggggaatcgaaacaggtgacatgatcctttccttcgataaaatgagaaagcgcaaagatgacgtcattgaaaagctcagaggcggaatcgcctttttattaaagcaaggaaagattgatgtgtataatggcagaggcacagctgtgacaaagcatcggattgagattgaaaaacaaggtggatcacaatcgattgaaacgaaagaactgatcattgccaccggatctacaccggccattccgccaataccggggcttagagacattcaatttgatacaagtgatacgatctttgacatctcagatatcccagcttctgtcgtcatcattggcggaggtgtcattgggcttgagcttgcatgtattttccagagtcttcaatcaaaagtcaccattattgaagcagcaccgtccattattccgcaagaggatgaagaagcatctaagctgctagaaagagaattgaagaaaaagggcatccatatcgcgaagaaaaccactgtgacagaggtaacggaaagcgaaggagtcaaagcggttcatgcaacagatgataaaggggagacacacatctttacggcggaaagactgcttgtctgcgttggaagaagaccgaatgtatcagctgttagccagcttgatcttcaactggatggtccgtttatcaaggtgaatgatcagatgcagacaagtgctgagggtgtatatgcagttggggatgtcgctggcggctatcagctggctcatgcggcgatggcagaggcagccgttgcagtcagcaatatttgtggtgagcatgaaaaaatgaatgctgatattatgcctagatgtatttatacattaccagaggtagcaagtgtcggtcttacggagaaagaggcaaaagccaaagggcttcacgtacaaacagaacgatttgatttagcggctagcggtaaagcgctagcggcaggtgttcaatcaggctttattaaattggtgtacgatacagtatatggtgaagtaatcggcgcgacgatggttggtccgcacgtcacagagatgatttcagaagcttcctcctttatgtatttagaaggaacagcagaagagatggcgaaaatgattcatccgcatccgaccatctcagaaggtttttatgaagcagctcttgatatcgtgagtaagctgagaaaataaatgccaaacaagggatagggaggagatgcatgtgcacgtccagcttcatcataaagcggcacttgtgacaggtagcacagatggatttggagaagccatctgcctggctttagcccgggcaggtgcacatgtttttttacacacattttatgatgaatcaaaggctagatccatttatgaagacattcaaaaaatgggcggtcaggcgagtatcatcatgaacccgctagaaacaccgcgtgatgccacgcgtatgctgaggcaagtgatcgatacatgcgggaaactagatattttggtcaatcaagcagcgcaaggagcggaagcggagcttgatgccgctcaccctgataaatgggtggacgaagtggaatcagctgtgaatactgtctttctttccagtcaagccgccgtatggcacatggtggaccagaagcaaggctgtattattaatatatcgtcatcaggcagtattacaggtgatggcgggatctcacatgctacatcgaattctatgctgaatgccatgacaaaagggctggcgcgagaatttaaagacaaaggtatccgtgtgctcgccctattgccgcctcctctccatttggttcctgacacagagcaaaccaaggagactgtggcccatatgacggtctttttaagtacatcatatggcgcatttacagatggtgcagcgattatgcttgatgggggtgagagtgctggataatgatcaaaaaccagttctcatcgttggcggtgcccaagggattggaaaggaaattgccgagcgttttttaaaagaaggatacagagtggctgtgtccgatatagatgaacaaggactttcacttttaaaaaaacagcactctgagctgctgacatttcaagctgacgtttcatcgtgggaaagtgttcagcagatgatctcagcagctgaaagggagctaggcggcattgctcatcttgtgtattcagcagggatgacaaaatcacttccttttttagaagtcgatttttcactttggaaaaagacactggctgtgaacttgtatggtctttattattgcatcaaagcgtcagcaccttatatatgtgagcggcaagaaggaagcattgtcatgatcggatcaggatctgctataactggctcaggcggcggaattcagtattacgcctcaaaagcaggtgcttttggcctgatgcgttcgcttgtaaaggaattaggggcacaccaggtgcgtatcaatgtgattgcaccccgtgtgattgaatctcaaatgcttgatacgctctatcctactgaggaggagaaaaagcagctgcaatcgcttatacctgttgggagattaggaagacctgaggatatcgcaggactcactttatttctcacaagtgacgagggaagctatttgcacggacaaattatcctgctagacggcgggagaacgtatcagccaaaatatacggagggaaaaagagcgaagaggtaatcgctctttttgtcattttcgtaacaattgttccaattagaaacgaatgtttggtatactgggaatcatagtatattaaaaggatgatgtcacatgctgaattgggaagaaagacgacagctcgtcaaagttgctcatctttattatacagacgggtggacgcagcaggaaatcgcaaaaaagctcaatgtctcaagaccagtcatttcaaagctcttacaaaaagcaaaagatgtgggaatcgttgaggtgtacattaaggacgaaagtattcatacggtggagctggaaaagcagctagaaacaacatttcaattaacagatgctgtcgttgtcccaagtgtcgggacaatgtctgagatggtgaaacgggcagtcggtcaagcaggcgcctattatctatctaaaaacatgaaagatgcggagaaaatcggcatttcatggggaaccacactggctgagcttgtaaaggaatacccgtttgagcgaagaaacgatgtgaaggtcattccattagagggcggaatgggcaggcaggcagtcgacattcatgccaatcagctggcatatgagctggcaaagaaaatgaatggcacgtgttcctatttatatgccccggcgattttagaaacagaagaattaaaagagcggcttatggcaatgcaggatatagaagctgtgcttgaagaaggtagaaatgtagatattgccctcatcggtattggcaacccgcataaaggttcaacgttaaaaacagttggttacttaaaagaagaggatttatctggtttaaggcaatcaggggctgttggtgatattggctttcgtttctttgacggtcaaggcaaacctgtccaagatgaactgaaccaaaaggtcattggtttatcactggagcagttaaagagtgtcaaaacggtcatcgctgttgtagaaggaacccataaagctgaaagtattttaggggctttaaatggcggcttcatacaagtgctggtgacagacgaactaacggcggcagccattttaaaggaagcttccgtccaataaacggctgatagcaatcgaattgtataaaaagagcaacatcaaacgagaaaggagctgtgtatcttgaagaaaaccgaaatggaagcaaacctacattgtactcggtgccaagaagagaccctccacagcatcgtttatgtgaatgatcagatgaaaagcgttgagtgtacagagtgtcatcagaagatcagtgtgcaagtcgacatcatgaaggaattttacaaagaagtatacgaaaaaattgcgacaaagccgaagcggatgacgcaggaatataaggcgaatttgaatggatttatatcaagactcccaatccgcgtgcttagtaagccataccggctcatgagatatttaaacgaatcatacaaagtgatcaaacaatataaaaaatagcagagcgctgtttagcgctctgcttttttttgtgcttttttcatataataataaataggcagtccagcaatcccgatcagcatggagattagacagcttttccagtcggtgatcatggtgctgattaagacgaataaagaaccgataatcgcaacgatcggtgtgagcgggtaaagtggtacgctataagcacgctccattccgctattttgttttctcagcttaaagactgcgaaaaaggccatgacataaaagatgtagatcatgaagatcgaaacctctgacagcttttctggattactgacgatcataaacacaatggcgatcaaaatttgcacaaatacagcaatccaaggtgttttgaaggtagggtgaatacgcgaaatcgcgtttgcgaaaggaatttgctttcgttcagccatcgcgaaaatcacacgtgggaatgaaagaacctttccgttcaaacagccaaagatactaatgatgattccgatactaatgaccttaccgccgattggtccaaagagcattgtcgcagcagtacttgtcgcattttcacctagctggacgatttgatctgctggtaacacgtgcaaaagagcgacattaataaagagataacaagccgtgacgattaaaatcccgcctgccattgcacgaggaagcagcttctctgggtttttcatttcaccgccaagtgctgcaagcaatatccagccatcataggcaaacaacgtagccaaaatcgctgcaccgaagttcatttgagcgatactatcgttgacagccataaagatattttcgtttcctttccataagccaaacacaataatagcggcaatcggaacaagctttccgatggtggtcagcccttgtacaaaaccgccgtatttcgttcccataatattgatcaaacataaaaataaaacagtgataatgccaattgttgtcgaccataaagaagaaagagaaaataaattggctaacaatgaaccaaaataaagaccgagcgcaccaatgatggcaggtccgtaaatgataatctgcacccagccgcataagtagccccaaaactcaccgtacacttcttcaagataagcgtacaatccaccagtccgagggatttgtgtgccaatttcagcaacagtcagtccgcctgcaagggtcaaaattccacctagcagccaagcaaataaggcgatgtctgagcttcctgaataggaaaggacgttgcctggcttcataaagacgccggacccgataatggtcccgatgacaagagatagggcaaaaaataagccgatgtcctgttttaacgctggttgttctttgttcattacacacgacctcctgcatcactttcgtacgttactgtgacatgtattttgttcattgtaatacgattttaggaaaacaagaattaaaaaaattttctgattttcgcatttgtatttaaaagtgttcgtttattggagatatcaggatgaacgttgctttaaaaacgaacgataaaagattatttttgatttaatgttaattttatcgtcagaaaccgaacttctagccaaatggttgacttttcttgaaaaatgacctattttattcataagggtattatcttgaattcgagatattttgaaataggagtgaacgtaatgaaaatcaatgggattcaccacgtatctgcattaacagccaatgctcaaaaaaatgttgatttctaccgccagattcttggcttaaaacttgtaaagaaaactgtcaatcaggatgacccatctatgtatcatttgttttatggagatgaggttgcttcaccgggtacggagctcaccttctttgaaattccaatgcttgcccgtcgtttgaaaggaacaaacgccatcacaagcacaggccttctcgtttcttctgaagaagcactttcattttgggaaaagcggtttgatgagacaggtgtgcagcaagaaacggcttccttgagaggcggaagacctgccttgcgttttcaagatccagaagggcagcagctatttttaacagtagaaccgaacgcacaagaagcgggctcaccgccagtgcatgacgatattccggcagagtttgcaattagaggcttgggtccagttgaattaaccgttgcagaagcggacaaaacgatccgtgttttaacagacatccttggcttcactgaaagagcgcgtgaacaatcaaatgatggtgagatcgtgaccatttttgagtcaggaaatggcggtgctggaacagaaattcatgtgatcgaaaaagctgaaggaccttctgagcgttccggcagaggaagtgtgcatcacgtagcttttcgcgtggaagatgcagaggagctggaaaaatggtatgacaaaatatcaaaagcaggcttcacgaactctggtgttgtggaacgtttctactttaaagccctttactttagagagccgaatggtatcttatttgaaatttcaacagacggccctgggtttacagtcgatgaaggggtagatgagcttggtgatcaattagcccttccgccatttctagagcacaaacgagcagaaatagaacaaagattaacgccaattcagtcatcataaaaaagcagctcattcatgagctgctttttgctttaggaacttacctgcttagattcagattgtattaatgtaaccttctttgtttcttcttttccgtttcgaatgagtgtgatgctcacggtgtctcctacttttgtattcgtgtatagctcatgacgtaattcacttccggttttgatttgtttcccatcgatggcggtaatgacatcctctgacttaaagccagctttggcggcaggtgagcctgcggcgatttctttgacgtacacacctttatcccgctgactatttttgagcccgagtgtttctttctgatacacgtccgggacttgttcgagatccagcatgccgatgccgatatatggacgctcaatctttccttttgcgagaagctgatcggcgattggtttgacatcattgattggaagtgcgaatccaatgccttcaacacctgtttcagagattttcatactcgtgatccccacaacctttccgtctgtcgtaagaagcgggccgccgctattacctgggttaatggctgcatctgtttgaatgacattaatgctgctttcgcctgctgatgtgttcatagagactgttcggtcgacaccgctgacaattccttgggtcaccgttcttgatagatcttcaccaagcgggtttccgatcgcgatgacggtttccccagcacgcagcgaggaggaatcgcctaatgccgcgacctttgtcacatgactgctgctaatttctacaaccgctaggtcagtcagggggtcagctccgaccagttttccttcaacagttttgccatcgtgcaaggaaaccattagtttatttgccccttcaatgacgtggttgtttgttaagacataggctttacttccggattttttgaaaatcacccctgagcctgtacctgttttttcctcttgactgtttttgttttgctgtgattcatcaaaaggcgtattgaaatcgccaaagctcatgtctgtttgactttgcgcttggtagtttgtaatgccgacaatggctggtgatatattttcgaccatgcttgagatactgctcgatgaatgtgatgtttggacggcggttgtttttgacgaattggcactcgtatcatttgtcgatacagcttctgtttttgctgctgaatcgtttgctgtgttgtctgatgcgtgctgggcatatggcgtaaggacgtagacacctaatgctagcgtaccacccacaatgccgctgacgaatggcttaaaccagccactgggcttcttcttttgtttttgtggctgttcaattgtttgaagttcatgagaagggtgtttttcatttttgtgatgtgtcattcgaatcactctctttcttcaatttttcatgtatggttcgagggattttaccttatgtggtggatactgactatatcgtaagaaaaaagtgtgggataaaaatgaaaacattgtgggaaattgttaaaataagtagtgaatctaagcaaaatagaggagattaaactgtggagacaattggaatgattggatatggaagcatggctgatatgatggtgcaaaaatggctggaaaaagaggtactcaatgcccatcaaatcatgatccatacaagaagtgaaacggaccgcctgcatcagctcaaagacaagcatcaagaaataaatatctgctcattagacgaactttctgcctcatgtgatgtactttttgtctgcgtgccgccgcttgttgtacttgatgtgctcgatcaactgccttcagcagccaaatcggtacatattgtgtcagtagccgcggctgtgacgttagacaagttatcaaagcatacgactcaaccagtttccagatacatcccaacgctcacgtcagctgttggaacgggcgtatccctcgttgcgcatggtgaaaccgcaggtcaggaagaaaaggcgcgtttgcaccgtctcctttcagcttttagcatcgtccgtgaagtagaggaagaccggtttgatgcggcgagtaatttgacgagctcttctcctggttttatcgctgctctttttgaagaaatggcgagagcggctgtgagaaatagtgagctttccttagaggaagcgtatgaatttttaacgtatgccctcttaggcacaggtcaagtccttgtagaacgcggcctcacctttgctgaaaccgtcaatagagtggcgacaaaagggggcattacaggtgaaggcgctgaggtcattcaaaagcaggcacctcagatgtttgatgatctatttacacaaaccatgaagaaatatgaacagctgaaatcacagattaacgaagctgacaaacaccactaaagacatagttagtggtgttttatttgttaaaaaaatcctttgtcatacagtcttttgacctgtattaactgagtctaatttccttattttcagacattgtattgaaaaatcaatcaagtaatcatataattttttagaaaatttagaaaaatatacacaaattttaagtttaattaaagggggatggggatgaaactctatgtatctgttgatatggaggggattactggtctagctgatcatacatttgtcgatgcccgtcagcacaattatgaacggggcagaaagatcatgacaggtgaagtgaatgcctgtgtagaggcacttcttcagcatggcgcaaccgatattttggtcaatgacagtcattctaaaatgaataatctgttgatcgaagagttgcatgaagaggctgctcttatatctggtgacgtcaagccttattccatggtgcaaggattagatcaaacctatgacgctgctgtttttttaggctatcatgcgagggcatctatgaaaggcgtgatgtctcacagtatgatttttggtgtcagacatttttacataaatgatcacccaattggtgaaatgggctttaatgcgtatgttgcaggctactatggtgtgccggtgattcttgtttgcggagatgatcaagcagcacttgaagcggaaaagctgatgcctggtgtgaaaacagtagcagtgaaagagaccatatcaaggtctgctgtgaaatgtttcacgcctgccaaagtcaatcaacaaatctcgcagcaagtggaagccgcaatgaaacagattcatcacatcaagccgctgacgcctcctgatcagccgctgctgaagattgagtttgccaattatggacaagctgaatgggcgaatttaatgccgtgtactgccatcatagaaggaacaacaacggtgacgtatcaagcagagaatatattagaagcctaccaagcgatgcttgtcatgacagagcttgccgcacgtacaacattttgttaagcgagggggagacggcagatgaccagctttttgctcaagcgttttattgcgatgattgccacgatcttaacgattacgactttaacgtttattttaatgaaggtcatcccaggatcgcccttcaatgaagaacgaaatacaaacgaaaccgtccagcgaaacctcgaaagctactatcacttagatgaaccactgtatgttcaatatgtcatctatttaaaatccatcgttacctttgattttggtccttccattaaaaagccttcagaaagtgtcaatgatctattggcaagaggcttcccagtctcattagaacttggtcttatctcaatattgattgctgtcatctccggcatcctgctcggggtcatggctgccctccggcataatggcttgattgattatatcgccatgaccattgctgttttcggtatatccattccaaactttatctttgctaccttattaattcagcagcttgctgtgaatttgaaactctttcctacagcgatgtggacaagtccgatgcacatggtgctgccaaccatcgctcttgctgtcggtccaatggccattattgcccggttaacaagatcgagcatgattgaagtgctgtcgcaggactatattcgcactgccaaggcaaaaggactttctccctttaaaattgtatttaaacatgcgcttcgaaatgcgcttttgcccgttgtgaccattcttgggacacttgtcgcaagcattttaacaggaagttttgtcattgaaaaaatatttgcgattcctggaatgggaaaatactttgtcgagagtattaacaaccgtgattatcctgtcatcatggggaccactgttttttacagcattattttaatcacacttcttttcattgtcgatgtggcgtatcgcctgcttgatccaaggattcagctgcatcagaaaggaggaaaggcatgagtatacacctacagcaggatcaaccgaatccgcatcatgaagtgccagacgaatggttttctccgagagagcaaaagaaaacggaggcccatgccattaaaagaccctctctttcgtattgggcagacacgtggagacggctgaagcaaaataagcttgcgatgtttagtctatcggtactgatttttctttttatcatggcgctattaggcccattgcttgcgcctaataatgtgacagagcaacgtctttcgatgcaaaatctgcctccatcagctgctcactggttcggaacggatgagcttggacgagatgtgtttacgcgtacatggtacggggcgcgtatttcgttattcgtaggcgtcatggcagcccttattgattttgccatcggcgtgatttatggagggattgccggttataagggcgggagatatgaccatgtcatgatgcgaattgtcgaggtgctctacggtcttccttatttactcgttgtcattttattaatggtcctgatggggccagggcttgtcaccattattgtagcgctcactgtcaccggatggattggaatggcaagaatcgtaagaggtcaagttcttcagctgaaaagccaggaatatgtccttgcctcaaaaacctttggtgcaaagagcctgcgtatcattcgccgcaacctgctgccgaatacgatggggccgattatcgttcagatgaccttgactgtgccgaccgcgatatttgctgaagcgttcttaagctttcttggtttaggcattcaagcaccgtttgcaagctggggcgtgatggccaatgatgcgctgccgacagtactgtcagataacggacattggtggcgtttatttttccctgcgttttttatttcactcacgatgttttgctttaacaatttaggtgatggcttgcaagatgcgcttgatccaaagatgaagaggtgatggcgctttgaaaaaagttctacaaatcatcgatctgcacgtcagctttcggacatatggcggctcagttcgagcggtacgcggagtgaatgtggatgtatatgaaaaagaaacccttgccattgtgggagaatcaggctgcgggaaaagtgtgacttcacaaagcattatgaggctgctgccagcttacagcgctcatgtcgatcagggagaaatctggtttgaagaccgcaatttgctgtcattatctgaaaaagaaatgcgcgccatacgaggtgtcgatatctcgatgatctttcaagatccaatgaccgcactgaacccaaccttgacaataggggaccagctcatggaggcggcaaaggagcatcaaaagctgacgaaaaaagaagtgaaagaagccgccattcggatgcttgatttggtcggcattccgcagccgaaggaaaggttaaagcaataccctcaccagttcagcgggggaatgaggcagcggctcatgattgccatggcactgatttgcgagcccaaagtgctgattgcagatgaaccgacgaccgcgctggatgtgaccatacaggcacaaatattagagctgtttaaagagattcagagaaaaacaggtgtcaccattattttaatcacacatgatttaggggtcgtagcccaagtcgcagaccgagtggcggtcatgtacggggggaaaatggtggaggtcggaacgaggcgagatattttttacagtccgcagcatccttatacaaaaggacttctacaatccgttccaagacttgatatgaaaggtgtactcattccaattgaaggaagcccgcctgatttatttgctccaccaaagggctgtccgtatacagatcgctgtccggccgccatgaaggtgtgtgatcatatcatgccgcatgaaacgcagcggtcacctacccatacagtgcattgctggctccaagatgagcgagcgaatcaaacggttttatcttcaacacaaagggggagtttttgatgagaaaaaaagggtggatcatcagtgtatgtttgttcacgatcatgctgctcgcaggatgtacagccaatgagcaagcagggaaaggatcatcaagcaataaaggtgaaaagaaagtgttaaccttaaataacgaaaatgaaccgacgtcgtttgatccgccgattggttttaataatgtatcgtggcaaggactcaataacttaatggagggattaacaagactgaatgaaaaacacgaaccatctcctgcaatggcggaaaaatgggagatatcagaggatggaaaaacgtacacgtttcatttaagagatggcatcaagtggtcaaatggtgatccagtgaaagcgagtgattttgaatatgcgtggaagcggctgcttgatccgaaaacaggctcttctgcatcgttcttagcgtacatgattgaaggcggagaggcatttaacagtggaaaaggcaagaaagaagacgtgaaagtcagcgctgtaaatgacaaaacgcttaaggtcacactggcttatccgcagaaatcgttcttaaatatgaccgcaaaccctgcctttttcccagtcaatgaacaggtagctaagaaggacccaaattgggcaaaagacgccaaaacctttgtcggaaatggaccgttcaagctgacagagtggaagcatgatgagagcttcacaatggaaaaaagtgagacgtattgggacaaaaaaacagtcaagctggatcaagtgaagtggctgatgatcagtgatcgaaacacagactatcaaatgtatcaatcaggagatttagatactgcctttgttccagcagagcaaagtgaaaatctgctgaaaaataaagatgtacaaattgaagaccaggctggattgttcttttatcgtctgaatgtgaacatagaaccatttcaaaataagaacattcgcaaagcttttcaaatggcgatcaacccgcaagatattgtggattatgtgacgaaaaatgaagagaagccagcacgcgctttcgtctcgccaggcatcctagattcaaagggtgaggatttcagagaagctggcggtgatcttgtgaagaatgataagagtgaagctgcgaagctattagaaaaagggctgaaagaagagaactattcgaaactgccagccgtcacattaacatatagtacaaagcctgagaacaagaaaaaagcggaagccatccagcagcagctgaaagaagcgttaggtgtagatgtgaagcttgcaaacatggaagccaatgtatttgcagaagatcaaaaggcgctgaaattccaattctcacaaagttcatttttagcagactatgcagatccgatcaacttcctagagagcttccaaacagggaatgccatgaaccggacaggatggtctagtgatacctatgatcagctgatcaaaaaagcgagccaggaagcagacgaacaaaagagaaacagcttccttcatgatgcagaggcacttctcattgaagaagcaccgatcattccgattcatttttataaccaagtccatttacaaaaagaaggcgtgaagggaattgtccgccaccccgttgggtatatcgatttgaaatgggcacaggtagatggagagtgatattaggatcaaaagacgcttttagataaaagcgtctgttcctttattcgttcatgttatgaagcagaagcccatagattgaaagaaacaaagagaaagaggggatatggcatgagccagctgccagtggcacttcaaacaggggatacggtggggattattgcaccagcaagcccgcctgatgagctgaaattagcaaaagggattgcctttttagaaagcctcgggctaaaggtgaaaaaaggaaagtatatcgactgccggtatgggtatttagcaggctatgatcatgaaagagtggaggatcttcatcgcatgtttcaagatccagaagtgaaggcggttatttgtgcttgcggaggatatgggactggaagacttgcggaagtcattgactatgacctgattcgccggaatccaaaaatcttttggggctatagtgatattacgtttttacatacggccatccagcagcagactggtcttgtgacctttcatggtccaatgctttcctctgatgtgggacttgaggaggttcatccttatacgaaagatacctttttacagctgtttgcaccgaaagcctttacgtatgcgcaccacttgtcaccccttcatactttctatccgggcaccgcttcaggtgagattgtaggaggaaatcttgccctcatcgtgacaacacttggtacaccttttgaaatcgatacgaagggaaagcttttgttcattgaagatattgacgaagagccctataaaattgatcgaatgatgcagcacctcacatctgctgggaaattggatgatgcggctggattcatcattggagattttcatcaatgtgagccaaaaaagaaagatcagtcccttacattgaatcaagtatggggcacctatattgtcccgcaaaagaaacctgcacttgggggcttccggatcggtcattcttcgccgaactttgctattccaatgggcacgcaggctacattagatgcgacaggaaaaaaactgcacatttctccaggcgttgcagcgaaagaggcgatcaaatgaaaatcgtcgatgttcgtacatgcagaatgagtgtaccgctaaaaaagcctttcaaaaccgctttacgaacggtgtatgacgcagcatctctgatcgttatcatcacatatgatcaaggtgacgtcagctacggagaagcagtcccgacaacggtgattacaggtgaaacgctggaaagcatcgactatgccatatgcgaagtgatcagaccgattttgcttggagcttccttgtcagaatatgaacaaattttttctcatatgaaccgagtgctcgcttgcaacacaagcgcaaaggcagcggttgacatggccatttatgatggcttagcgaagcaggcaggacttccgctttatcaataccttggcggatatcgcagtcagcttgaaaccgattatacggtcagtgtaaaccgtccgcttgagatggcggaagatgcgaagcaatacgcagctgaaggctttcagacgttaaagatcaaggtaggaaaagatgacatagatacggatattcagcgtatcaagcgaattcgagaaaaggtcgggccggatattcagatcagactcgatgcgaaccaaggatggacgtggaaggaagcgatcatagccattcggaaaatggaggcgctgaatatcgaactagtagagcagccggttccgaaagaagatatcgaaggcctgcgccgtgtgacagaagcaacagatacattgattatggcagacgaaagcattttcagttttcatgatgcgatcaaggtgcttgaaacgagaagctgtgatctgatcaatttaaaattaatgaaatcaggcggcataaaagaagccctaaaaatcaatgctctagcagaagcatacggcgtaaagtgcatggttggcagtatgattgagtcaaaacttggcattacagcagccgctcatctcgccgccagccagccgaatatcacccgctatgattttgatgccccgctgatgctaaaagaggacatggtagacggaggaatcgtgtacaaaggaaaagatatcttgttcccgccgcatcatgggttaggcattcaaggggtgaaaggagtctcatgatgatatttgaatcaaaggttgcagttgcgaacgtatggacagcgccgcagtcaccgagagaaatcgatcaaaaggtacttcagggctccttcaaaatcaaagagtggattgacaagcaaacatatgaagaaaaactggctttatgtgaagaaaatctgatccaatcgcaagtactgctcggcgaacgagtcattggattagaagagacagacggctggatgaaagtcgtcattccgcagcaggccagccggaaacatccgcaaggctatcctggctatatacctacgaaccatctaaagcaagtgacagaaggaagtgcgccagctatatctcatatcgtttgtcagaaaaaagccatgctctatcgaaatgggcaagcggacatgaaaattagttttttaacagagctcgcagctgtagaagaaacgagtgattgctttcgcgttgtcacaccagcagggacgagagaaatcaataaagtagatgtgcagtcagtttcatccatttcttctatgaccggcaaagatgttgtagagaagggaaaacaatttattggtctttcgtatttatggggcggcatgagcagctttggctatgactgttcaggctttgcttacagcatgtataaagcgtgcggatatcttttgccgagggacgcaagtgaccaagcagtgcaaggaacaccggtcgcatcaagccatttagaacaaggcgacttattgttttttgccaatgacaacggaaagggagctgtccgccatgttgggatctacgcaggtgacggtatgatgcttcattcgcctaaaaccggcagagaaattgaacttctttccctttctggcacttcatatgaaaaagaatgggcaggtgcaagacggtatttgccaagcgagaggaggaatggtcatggcagttgaaccacttttacaagtaaacaatctcaaaaaacattttcatctatcgaaaggaagaacgcttaaagcgctagacggtgtctcctttcagctgaaacaaggcgaaacgtttggccttgttggcgagtctggctgcggaaaatccacacttggaaaagtgcttatgcgtctttatgaaccgacagatggggaagccttatatgaagggaaaagtcttcatcacctttctaaaaaagaatcatttgattttaatcggcaaattcaaatggtgtttcaagatccgtattcctccttaaatccgcggctgtctgtaaaagatattatgctggagccaatggagattcacaacctttacgggagtcaaaagaaaagagttgtccgggtgaaagaactacttgaagctgttggacttagctatgactttgcgactcgctatcctcatgaattcagcggagggcagaggcagagaatcggtattgcaagagccctcgccttagcgccgaaatttattgtggcagatgagccaatttctgcactagatgtctccgttcaagcgcaggttgtgaatttgctgaagaaactgcaaaaggaggaagggctgacatttctctttattgcgcatgacttgtcgatggtcaaatatatcagcgaccgaatcggtgtcatgtatttaggtcatctcgtcgaattgaccagcagtgatatgttatatcaaacaccgctgcacccatatacacaagccttgctgtcagcgatccccattccagatcctgacgtggaggacaagcgcaaaaggttcattttaaaaggagaaattccaagtccagtgaacccgccaagcggctgtgtatttcgaacaaggtgtcctgcagcgatggatgtgtgtgctgaaaaaaagccaacattacaagcagtagaagaaggacatgatgtcgcctgtcatttatacgatcgaacataaaaatagacagaaaaaaagccagcaagtagacaagctgttctacacgctggcttttttagtggatgaacgccgaatcggcaatgtgcagcatctaaaagagccgccagatttaatgatttctgaaaaatccacttcaatgacagtgtacccgtgagcggttaatgcagcatttgtttgttgattgatgggcaaactgatcacttttttctgtccaagggataaaacgtttggtccgagtgtgaattgctcttgttcgcttatttcaattagatgataatgcatttgaagcaggtgaagatcctcttttttgaacgcttcaggataaatcaatatctcatcatgagagagaatattcatcacacaatcgagatgcaaaatgtgaggaggaagatgaatgggaatgatgtcatgatcaggcagtccttttttgagctcatggatagcggctgggtttgttctcttgctcgttccgacaaatacgcgtgtttgatccacaagtacatcgccgccttcaatcgttccatttgtcagtgtgacagttttccagccttttccctgtgcccactcttttaataattgttcttctccttgccgaactggagcggccatgcttgaaacaaagagtgtatgtccaatcgtaaacccaatatcccgagtaaagacttgctcaggaaagcggtcatttgcaggaagcataatggggcgtacttgatggtcttttagtgtttggatcaattgcttatgctgagcaatggctttcatttgagaaatattttctcttgcaaaatgtttttgggtttcgttgatgatctgtttgatttccatatagatgggactgcataaaaggacttcttgtaaatcgtcatattcactcatgcattgcggcattttgtgtatttgttctgctctcatagaatccatcaaatggcctccttgtttgttcatagttctattattcctcgttctagtcatagttgaaacatttccgaaagaaaatctctcacaagagactaaagcaaaaagtttagacaaacctaaaagaatagtgtttaataaaagtcgttccgcattcacgaaaacagcaagaaggagctatgatgatgagtgaagaaaatttcaaatactgcaaggaatcgaaagttgtcaaaaccagcagggtattccctctcgatacgaataaccaccaaaccttatttggcgggaaattaatgagttatatagatgacattgcctccatctcggcagcaagacacagccgcagtgaaacggtcacggcgtcgatggattctgttgactttttagagccgattggacaaaaagagtcagtatgcttggaatcctatgtgacgtgggtcggcacgtcttccatggaagtgttcgtcaaagtcatgaaagaaaacttgatgtctggagagcgcagacttgcagcgacttcatttctgacttttgtctcgctagatgaaaacggaaagccaaaacgagttccacaagtcgtaccggaaacagaggaagaaatcatgctgcatcaaacagcgaagcagcgggcagaagaaagaaaaagccgccgaaagcatagcaaggcactggctgacgcacttggaacagataaaccatgggcgtaaaaatcaccctttcagcggtgatttttttctaggatagtatcttgcatgacaagatagtgtgtggtaagatgatgctatcttgtgatgcaaggtactggaatcggaggaacaaagatgacaacatccacacaaatgttaaaaggaattttggaaggctgcctgctatcgattatttctgagggtgagatttatgggtatgaaatgacaaagaagctcgcgcattacgggtttgatcaaattagtgaaggaagtatctatccgatcctgctgcgtatgcaaaaggaacagctggtgactactgtcacaaaaacatcagcgagcggaccgaaaaggaaatactatacgctcacacaagctggagaacaagcgctcacagagtttatgacccgctggagtgagctttcaaaaaatgtaaaccgcttattacaaaaagggaagtgagattatggtatcaaaagaaacaagacacatcctactagagctgaaattatatctcatatcaaagggaaaaaatgtggacgaaattgatgagctgatggatgaattgacgacacacgcggtagaggctgaaaaagatggtaaaacaggggaggctgtgtttggcggagatccgcggagctatgctgatgaactcgcaaaagagctgtcaggacaccataaagactgggttccattcatcagtgccttcttaatcgggtctctcttctacatgattttatcagattcgatcagtcaaagcttatcctattcttggtatgcattgattggctatccgctcgttttagtggccaatgtcatcatgatcattgtgatgtttagagcgtctgcctttcagacaagccgccgggcatttctttacttttggatcttaggaatctttcagctgaccgcgatggtcacaatcaaactattggatcaaaaactcggcacaccattacttgtcctgacttcaggtcaaagatggggcgtcatcctgcttatgctgctatgtatcattgtctttaatgcgatcatgaaggcgaatgttgtttcattgataccagttatcttcttcggaccgcagctcatattcgagtggattggctggacatcaccaagcgtgcttttcttgcaaagtctattatctattgtgatcttaatcgggctgatgctcattattttacgccggacgaataagaaaaatgaaaatacattgtaaaaaacagagcacatctataatcctataagatgtgcttttctttttctaaaaaaatgtagaaatggtatcgtgtttttcattacaatgggaaagaggacaaaaatgaaaaggggttctgtgcttggatattttatggggatatgtacttgtgtttgtattggctgctttgcctttttttgaagtggtaggggtcgttccgttggccattttaagtggcatgcatcctgtaccgactgcggtcattggattcatcggcaattattttaccgttttccttctcattgttttcgtagaccgcttcaaagcatggcggttgaagagaaaagaggacaaaagtgatgaaaaaggagagaaaaagcagctgcgggccagaagaatttgggaacgatatggtctcccaggattagcgctcgtcggaccttttatcatcggcagtcatctagcggcatttatgtgcatgagcttcggaacgaaaagaaagcaagtcgcagtgtggatgacagtcagtttaatgatgtggacagcgctggcagctagtttaaccggtgcgggaatccattactttgccccagattcaaatggattgttcggagatatttttagtaagtaagtgaggggaggatcataaatgaaacttcaaacacggacagtgcttgaaacagagcggctcaggctaagaacgatgaatgaacatgatgcgccatttttatatgatatgttgttccaagatgaagaagtgatgaagtattatccttctttgaaggatgagcagcagacgaaagagtggattgcatggaatcaaaagaatgaccgtatgtatcatacttccctctggatcattgaagacaaagaaacgaatgaaccacttggacaaagcgggattgttctgcaaaacattgaaggacaaaccgaacttgaaatcggctacatgctaaagaaagaagcgtggggaaatggctatgctgctgaagccgcaaaaggctgtctcacctatggctttgatgaaatgaaagtcagacgaatggtgagcttaatccgcccagacaatgaagcatcggtaaaggtcgctttaaaaatgggcatgaaaaaagaaaaaaccatttcgaaatgggaccaaatcattgatgtctacagcatcacccgcaacgaagaaaacggctcgcttacaaaataagcagagccgtttttattttatatccgctgttctagctgaagtaaatatttcttccgttctatcccgccgccgtagccgccgagctcaccacttgtttgaatgacgcggtggcatggaatgatgatcgccaattgattggcaccatttgcattccctaccgcccggaccaaatgcggatcgcccagcatcacagcaagctcgcggtaagaacttgtttcgcctgatggaatgcgtgtgagcaggtcccacaccttcatttgaaaaggggtgccatgtaaggaaagtggtaccgagaactgcgtgagttttttctcaaaatataaggtcaattcctttgctaattgctgatggacgtttgtttccccgactaaaatacgggcttgatgcttttttctcatgttctcaatttccttttcgagtccccgcctgtccacaaattccagtaaatacacatgcgtcgcatctgtcacgctgatcatccgcccgatcggtgtagaaataaaattagcgtggagaatcttggtttgcgtctttttagggggatttcccataattttcgtaaatgcatcattgaaggcactcgaagattcatagcccaaggcgacctgctgatcaatcactttttttccattcagaatttctttaaaggcaagtcccattcggcgtgatctcgcatattgaacaaaggtcataccatagatttctttgaatttccgccgtgccgttgcagagtgaatccctaattgatgaaagtcttcttctttccagcgtttttcagggtgtgtttcaactgcagaaacgagtgttttgacttcttccggaatgctgttagggtatgttaatggtgtgcagcgcttgcacggacgatatcctgctagcagtgcttcctctgctgtaaagaaaaactcacagttctcatattttggttttctagcggtacatgtggcatggcagaagataccagtggtcttaatgccggcaaagaatgtgccgtcatattgcgggttcttgtcaaccagtgcttgataaaattcatgtttctgttcgtcggttatcatcatacgatccacctcttggtttcctataaaatgtgattcagcgtactttgggctggtaaacaaagcgtcatcttggatcgttcatcacatcaatcttatttcattatatcagcgatgtgatcatttctctgtctatcatttagtatacgccggtctcatatcatttctttcgaaaaatgaacaagtatatttgaagagggagagcaaactggtagaccggcatatcggggtgtgataagatttttaatacagaatctgctctaagtcaggtctgtatatcatgaattggttttctagggttccgtgcgctggtgcagtctggtccgagagaaaacacatagggtcttagaagaggccatatggacacggagggataaaagcccgggagatttgatcaaacgatcgatttccaggctttttttgttggttggaatcgttcagaaaggagaagatcagatgaaatggggaaatgtctttattgcggccatctttgaggtcggctgggtgatggggctgaaatatgcccactcgctcatagaatggggcgcaaccatcgtttgtattatcgtgagcttttatttactcatgaaagcaacaagtgtactgccagttggcacactttatgccgtttttaccgggcttgggacagcaggtaccgtcctcataggcatggtgcttggtgagccggttcagcttgtcaaactgcttttgattgtcatgcttttgtgcggtgtattaggactgaagctgacaacaggtgaaaagaagggagaggctgaatcatgagctggcttttactcattggagcaggcatcttagaaatgctttgtgtgaccatgatgaatcaattccaaaaagaccggcatgtcaaatggattttattcattgcagctggcttttcgatgtcttttctgatgctgtctcttgcgatgaatacgattccgatgggaacggcgtacgctatttggactggaatcggagctgctggaggcgccatggtcggtatgctgttttacggagagtcgaaagacgcaaaacgtattttcttcatcgccctgattttatctgcggcagtaggattgaaaatcattgaataagaaaaggctggcagatagatgccagccttttgttacattgaatgatgattggaatcgttttcatttttgcggtaaagctggctcgcaagcagaaaacacacaccaaatgtgagaaaaggaatgagtctttcaccggctataaaaagggaaatacctgtgatcagacaaacgatgccgagccaaaagctcactttaccaaacaaggtcatacttttcatctccatcactccttttatgataaaaggtctattcacattatatcatgctaggtgcagaattgaatgaatattcaataaaaaacaggactctacattgctttttctctttccagtccagtataatatttcattagaatgaaaacgtaaatgaggtcatgatacatgagaactttgataacagagaaacttgaattacacagacaaaagcatgagcaaaaaggaaggttgcttgtcagctgtccggatcagcctggaattgtatcagctgtttcttcctttttatttgagcacggagcgaatatcattgaatccagccaatacacaacagatcatgaaagcggccggttctttttaagaattgaatttgattggaaagacatctcggcaaatatggatcagctgaagcatcagtttgagccaattgcagcatcatttcaaatgacgtggagcatgtcgcgtgcaagtgagcttaaaaagctggcgatctttgtgtcaaaagagcttcattgtttacatgagctgctatgggaatggcaaagtggaaatgtcatggctgaaattgcggtcgtgatcagcaatcatgaaacggcaaaagatacagtagaatcgcttggaatcccgttccattttgtgaaggcgaacaaagacattcgcaaagaagcggaaaaacagcagctcgcattattagaagagtatgatattgatgccattgtgcttgctagatacatgcaaattttaacgcctgaatttattgaacagcacccgaacaaaatcattaatattcatcattcttttctgccagcgtttattggtgcaaatccatataagcgggcatatgagcggggagtcaaattaattggcgcgacttctcattatgtgaccaatgatttagacgaaggaccgatcattgaacaggatattgagcgtgtagatcaccgggatgatgcagaagcattaaaaaatattggccgaacaattgagcggagtgtgctagcacgtgccgtcaaatggcatctagaagatcgaataattgtgcatgagaataaaacgattgtatttaattgacggcttgacttttcctgagcaattggtgataatataaaaaaattaacgagcgttgaaaaggaatagtaagcaggaactgatgcgtaaagagagcaaatgacatgctgaaacatttgccgcagacagctgctgaacctgccctttgagccttagaggaaaaatctaagcgcgtgcctggcgttacaggagttgagtggaataagctagatgtatgcttattcaatgaaggtggtaccacggaaaatcccttttcgtcctttaaacaaggagaaaaagggatttttttgtgcctaaaggtatagcggagggaatcaataatgaaaaagcaaaggatcgtcatcaaaattggcagcagttcattaacagagcaaaaaggagccattgatgaacaaaaaatgcaggatcatgtgaaagcgatagcaaaactgaaagaggctgggcatgaaatcattttaatttcatcaggagccgttgcagcagggtttggcagcttagggtatccatcaagacctgtgaccttaaaggggaaacaggcagcagctgccgttggtcaaggcttgttaatgcagaaatatacagagctattttcacagtttcacatgacacctgcacaaatgcttttaacccgtaatgacttttcagatcgaacaagatatcgaaatgcttacgcaacgatgatggagctgctggaaagaaaaattttaccaattatcaatgaaaacgattcagtttcgatcgaggagcttacctttggggataatgacatgctgtcagctcttgtcagtggattaattcatgcagaccaattgatcatcttaacagacataaatggaatttataatgcaaatccaaatgagcatcctgaggcgaagcgttttgatgtactaacacacatttcagaagaattgttttcatatgcgaagagcacaggttcaaaagtgggaacaggcggaatgaaatcaaagctgtctgctgcacaaacggcactttcacttggcgtgaaagtcttcattggcacaggtactggagaagacaagctgcttcacattcttgcgggtcaaggtgacggaacgtatatcggagaacaggacttatcagccgtcaacaaccgccgtcaatggattcaattccattcacccgtttctggcaaaatcatgatagatgcaggagcggaagcggcgattttgcataacggcagaagccttcttccggctggcgtcattgatgtcgctggtgacttttctaaaggagaggtcgttgaagtggtcggtccgaacggattagtgggtaagggacaaaccttgtacgcatccgatgagcttctcggcattaaagggatgcgaagtgatgagctttcaaatgagaagcctgaggttatacacagagatcactgggtacagcatgtacaaaactgaggagggaatacgatgaatgaagttcttgaaaaagcaaaaaaagcaagtacagccaaagatcagctgctgctaaaaacgacggagcaaaaaaatgctgctttacatgccatcgcaaatgcacttaaagcatcttccgcttatttattgggggagaataaaaaggatgttcaggctgctgaggaaaagcagttcacgccttctgttattgaccggattacactcacagaagagagaattgacgccatcgcagacgcaacccttcaactcattcacctaaaagacccaattggtgaaacattagaaaccattcaaaaagaaaacggtctgttcatcgaaaaggtgcgtgtgcctctcggaacggttggaatgatttatgaagcaagaccaaacgtgacagtagatgctgccaccctttgcctcaaaactgggaatgctgttattcttcgcgggagctcctctgccattcatagtaataaagcgattgtcaaggtgatccatgaagcgcttcagacaacggatattccagtagacagtgtgcaattgattgaagatacaggccgtgaaacggcgaaaacgctgttcactttaaatgaatatctggatgtccttattccgcgcggcgggaaaaatttaattgatcttgtcgtgagagagtctaccgtgccagtgcttgagacaggtgcagggaactgtcatatctatattgatgaaacagcgaaaaacgaaatggctgagcagattgtgctgaatgctaaaacccaaaggccatctgtttgcaatgcgattgagagcattgtcattcatgaaacatgggcaaaaacatatggcgcttcgttatttgaagccctgcatgcaaatggggtagagatacggggcgatgaagccgtatgtgcccttgcgcctagtgcttcattagcgacaaaagaggactatgaaacagagtttttagcgccgattgtcagtattaaaatcgtagagagcatagaagaagcgattcagcatattcaaacgtatagctccaagcactctgaagcgatcattacggaaaatgatcagcatgcttcacttttcttaacagctgtcgacgctgccgctgtctatcataatgcttctactcggttcacagatggctttgaatttggctacggagcagaaatagggattagcacacaaaaactgcatgcaagagggccgatgggtctgccggctttaacctctgaaaaatttgtcattcgtggtcaaggacaaataagagaataacgaattcaaaagagagtcttgtgacagcaggctctctttttcctttcatttcatttttgtatttcttcggtcaagtatgataaaatatggtaatgttttatattttgagaagattggagaaggcaacgtatggcgaaaatcattccctcttcggatattggagtgaaaatcaacaagtggtatgaattaatccgcagatttgattcagaacaagcagaacaattaaagcaggaaattcgcacctctcttgattcaatggaagaagatcagaatttgcttctctatttttctttaatggaattcaggcatgaggtcatgctcgattacttaaagccattaaaggaaggaaagcttcgcgccaacttttccgagctttcgaaagaaatagatgagcatcaaacacatgtcacaggcatgcttgaatactactatcattttttcagaggcatgtatgaatttggccgtaggcagtatattgctgccatctcgtcttatcaaaaggcagagcacaagctttcttttgtgtcagatgatattgaacgtgcggaatttcattttaaaatgtcagaaatatattatcacatgaaacaaacacatatctcgatgcaccatgccaaactggcgctggatgtctatattcaacatgagctatatgcgcttcgcacgatccaatgcgaatttattgtggccggtaactatgatgatatgagaaggcatgaaaaggcattaccacatctcgagagagcgcttgcgagatcaagagactttcagaatgtgcgttttattgcttcctctttgtttaatatgggcaacagttattaccaaatgggagatcttgaccgcgcactcgaactaatgaaagaatccatctcgttatttgaccaaaatcaatccgatcaccttcgtcgatctatagaccctctttataccgccgctcagatattatacaaacaaggtaaacacgaagaagccttacactacagagaagaatgtatgaagcgagcagaagcacttcaggatgatattcatattcagaagacgatatttttagaagcattgtatttaaagcaagatgcggagcatattaaacgaatttttcattttttagagtctgcctatgcatatccagatatagaggagctggcattagacaccgcaaagtattataatgaaatgggagattatgaaaaatcttccatgttctacagagaagcggaacatgctcgaatctatattcagagaggggattgtttatatgaattttaaaaaatgggcagtcgtctgtacaagcatcaccatcctggcgttatggctggcagcagcaaatgccgacccggataacagaaaccatacgctagaacaaccaaatgcgcagcatgacatcatctaaaagcttttgtcaacaatctgaaagcccttattcaagggcttttttttactgtctaaaaatgaatctgcgtgacatgctcataaaatagaagtgagaaggaaatcttagaaaaagagtgtttattcattgactcttgaatttaaattgtgtacaattcaattgtagaaaatattattagagagaaagagggttatattcatgtcagatattttatttactgcaacggtatcagctgtcggaggaagagaaggaaaggttgtttcaaccgatggtgtgcttgagcatgatgtagcaatgcctggaacaccaagagcgaaaaaacttgaaaaagcaacaaatccagagcaattattcgcagcaggctactctgcatgttttgattcagcccttcaaatggtcgcgagacaagagcgtatccgttttgaaagtgaagtaacagcacatgtgagcttagtgaaagatagttcagatggcggcttcaaactaggcgttaagctagaagtaaaaggaactggaatcgagcaatcagcattagatgagcttgttcataaagcacatggcgtatgcccatattcaaaagcaactcaaggaaatatcgaagtagaactagtagctgtcgcacaataattgacatcataaaaggctgagggaatgttccctcagccttttggttgtgttaatttttgcaaaagctcatgcaaagaggcgcgcagcgtttttaactcttcttccgatctgcctgtcccagacagcatatgaaatggaatcgcagtagccttctcttttagttgttcgccatattccgttaaacgaatttgcacagaacgttcatcctctttcgagcgctcgcggatgatgagtccgttttgctccatccgtttcagcataggtgtgagtgtaccggagtctaaatataaaagctctcccatcgttttcacatttaatgtcccatgctcccacaataaaagcagtgccaaatattgcggatacgtaatgtctaactcttctaataacggtttatattgcttcgtcatctctcttgaacttgcatataacaagaaacaaagctgattttccagcttcatatgctcgaattcatttgtcatgtcagtcaccaactattttttgtcatacttattattgtataagattttcttcctttttaaaataaatacagcccaaaaatgaaaaattctttaatgtgcgataaatgtttgagaaatggatagaacgtgaaaagaataaatagataaaggaggagatgaagatgaaaccattattcacagcaaaagtaaaggcgcagcatggaagagctggacatgttcgttcagaagatggtgtactcgatcataacattgtcatgcctaatgctaagaaagacggagaaactggtacgaatccagagcaattatttgcagccggctatgcagcttgtttcggaggggcacttgaacaagtagcgaagaagcaagggatagacattgaatcggaagtagaaggacatgtcagtcttttaaaagatgaaagtgatggcggctttaagcttggtgtcaagctgattgtgtctgcaaaaggccttgaccatgacaaagcgagagagcttgtcgaggctgcgcatgaattctgtccatattcaaaagcaacaagagggaacatcgaagtagagcttgaagtggctgaataaaaaaggttttctatcacgctgaaaaaaagaaacacctgctggtaagcaggtgtctttttttaatattctttcttttgttcgtatgtttcccaagcttcaaacggtgcaagggttttttgaagtgtcagctggtaaaatggaatatttcttgattcgtaatccttgttgatttcttcataaataaacgagtcatcaaaaccagaagtcgctgcatcctgatgtccagcagcaaaatacacggcttttggtctagcccagtaaatagcgccaaggcacatcgggcaaggctcacagcttgtatataaaatacaatcttctaattggtatgtatgtagcgtctggcacgcctttcgaatagctgtgacttctgcatgtgcagttggatcattcgttgttgtcacattgttgcttccttctgcaataatctgtccatccttgacaatgactgctccaaaagggccgccagtaccactattgactccttctactgcaagatcaattgcgcgttgtaaaaaatcttcgtgattcattgtcttcctccctttgttcgactgacttctctagtataaacgaatcatgctagaaaaggaaacatcctagtagatggtcaaacaggacaatctgcgcataaaaacccccgccatgttcggcaggggagagggaatcaattatgcatgctgcgccagctttttacgagcgacttcagcagccgtcaccatgtttttcaaagcatcaatggtttcaggctcttgtctcgtttttagaccacagtcaggattcacccagaagcgatctgtcggacatacgttcagcgcatcatcaatgatttgactcatttcttcgacagatggaacgcgcgggctatgaatgtcatatacaccaagtccaagtcctttcaaatacggatgcttttctaagtaatcgaggaatccgccatgactgcgtgaatgttcaatcgtaattacgtcggcatcaaggtcttcgatcgtatcgacaatatcctcgaagttactgtagcacatatgtgtatgaatttgcgtttcattttgaacagatgatgttgatagtcggaacgactctgctgcccagtttaaatattctgcccaatcactttctttgagtggaagaccttctcttagcgcaggttcatccacttgaataacttgaatccctgcttcttctaacgcttctacctctttacgtaatgcgaaagcgatttggaaggcaatgtctttccgggaaatatctgttcttgggaaagaccagtttaaaatggtgacaggtcctgtcagcattcctttgacctttttctccgttaagctttgtgcgtaaaccgtctctttcacggtcattggcgctgtaaactcgacatctccataaatgattggcggcttcacgcagcgtgatccgtaggattgtacccaagcaaatttcgtaaaggcaaatccggctagcttctcaccgaagtattcaaccatgtctgtacgttcgaattctccatgtacgagaacgtccagaccgatttcctcctgaatatcaatccatctttttgtttctttcttaataaattcatcatattctgcatctgtccactcatttttacgccatttttgacgagcactgcgcacttcagcagactgcgggaagctgccaatggttgttgttggcaaaagcggcagttcaagagattcgttttggatacgaaggcgctcttcaaaggcagctggacgtttaaagtctttcgatgaaagattgttgcgttctgctgtgaaatccgcattggttccttttgcaaattcttttaaagtaagaagtgcttgcgtggcttcattgatggcggcttcaatcgctgcggctccttttgttaagccttcttttaatgttgttaattcatccagcttttcagtggcataagacagtccgtttaatagtttctcttcaagctgttcgcttgggtgttttgcaactggtacatgcagcaaactgcttgatggctgcagccatacttccttcggctgaacgtcagcaatgacctcagaaatgaatgacaatctttctccaagatctgatctccaaatatttcttccatcaatgacgcctgctgctaaaattttatctttcgggaagccatgctttttcacttgatcaagattgcgcccttgatcatggacaaaatcaagaccgatggcttcaacaggatatgtgacaagctcttcataggcatctactgaatcaaagtatgtttgaagaagaatgtttaaggcaggtacggcttctttaatcgcttgatagatttcttttacggctttcacgtcttcatatgaagcggtgacaagtgctggctcatcaatttgaacccatttgacgccagcttcttcaagttcttttaaaacctgagtataaagcggcacgagacgctgctgaatctcttttacttcatttggttcatagcctttagaaagtgagacaaatgtataaagaccaagtacaacaggttttgtttcaacaccaaacgccgttttcaccttttcgtaagcttcaagcggtttgttatgtgtgagtttgaattcggtgcttttttcgtattctggaacgatgtagtgatagtttgtattaaaccattttgtcatttcacttgagacagcatcttttgttcctcttgccatcgcaaagtatgtatctagcgggtcttttaagctgcggaagcgctctggaatccaattgaacatgacagcagtatcgagcacgtgatcgtagaaggtaaaatctccagaaggaacaacatcaatttgttgatcaatttgcgttttaatggccgttaaaaattgttcatccagtgtgcttaagagggtttcgcggtctgtttgacctttccaataagactcaagtgcttttttccattctctgtttaaaccaattcgcggaaaacctagattacttgttttaacaattgtcaattccaattcctcctctaaatataaaaagacatttacactcatggcgaagattgatgagggcaaatgtctggtttaaaaagacaaaatgtgtgtgcgaaataaggcgtgagcataactgacgctttttccgacatctcctatcaaccgtagggggtttgatgtgatagagcggctggtatcctggctggtgaatctgcaagcttttcatccttcccatccttatgacagtggattcatgagaaaagctctcctcactcacagtggcgggaccgcgccggattttcaccggtcttcccaattaaaattcgacgtgtgatcgaattaccgactctcaaactatgaatttattgtgttcgattatataacgtccacttcatttcgtcaaagtaaattttgaataattttaattaaaaaaatcctgagaaaattcaatctattctcaggatctctattcaagctatagagataaaagatctgcttccaatgttttttctaaaaggacatcaggcgcagttaaatataaaaatccatttccgacgagggctttcgactgcttcagtggaagggttcttctgacaagctgagcatagacctcaggctctgtcagcttgcgctggaacgcttcttcctcggcatttttaataatggctagtgcaccgcttacgtgaggggcggccattgaggtgcctgtgagtctgccgtatttatggttagggagagtggataaaatgtcttctcctggagcgacgaggtcgatttctttattggcattggagaattcagaggattctcttgcaagagaggcagagccgacggcaatgacttcattgtatgctgctgggtaggagaactcttctgtacgctcgtccccatccccttcatttcctgctgcgcacacaacaagtacaccgcttttcaccgcgttttgaatggcttcctgcaaggcgggctcattgcttggaccaccgagagacatggagataatatccaccttctgctcagcggcatagttgatgccattaatgatccattcgtatttcccgctgccattttcaccgccaagaactttcacgatcagcagcttggcttcaggggcaacccctagaattccgccattttgatctgttgctgcaatcgtccctgctacatgggtgccatgtccgttgtagtctttcacattttcagcatctccgttgtcatcatcggtaaagttcttgcctccgataatctgatcttttaagtcgggatgctccgtgtcgcaacctgtatcaaggacagcaatggttatgccttttcctttgaagccacttgaccaaagttcgggtgctttaatctcctgaatactttccggcgtctctttcgcttccatcacattggcttttacttcatacggaattaagcgaatttcacctttcataagaaagccctccttattttgttttcaaagtagattcaggctgcgtaatgttattgtataaaagaaacttttgatcggaaagggtcaattgtaataatttttcaaacaatcaatctattatcaaaagtgcagttctcctcacttcttgacgaaagaactcaacttttgaggaaaactcttgatatcatatgaaaaaggaggatatgctgcatagtgagtttgcacctgtacagatgaaaatgggttaaaaggactaaaagaggcaaactaaaaaacaaggaaatcaagcaataaatgcgatataaaaagtatgtataatgtttttgttcaaaaataaatgtttctttcataaaaaatagacatgaagattgtgactgttccaaatgcgaaaggcaacatataataatgaaaagacaagcttgcctttcagataggagagatagagatgaataaagggaagatactcgtagtcgaagatgaaaagaaaattgcaagggtgctgtcactagagcttgaatatgaaggatatgaggtgacagtcaaagagactggaatggatggacttcaggctcttgaagaagaaagcttcgatttggtgctgcttgacgtcatgcttccagaattaagcggtcttgaagtgctgagaagggttcgaaagacaaatacagcgacacctattatgttgattacagcaagaggaagtgttcctgataaggtaagcgggctcgatcttggggcgaatgattatattacaaagccctttgacatagaagaattattagcacgaattcgcgcgcagctaaggttgaatattcatgcgcaagaagagatggagacagagctgagcatagcagatttgactgtcaacgagaaaacaagagacatacaaagggcaggccaaatgcttgaactcacaccgagagaatatgatctgcttgtccacttgctgaagcatcagcagcaagtgctcacaagagatcaacttttaacagccgtttggggttttgattattttggtgatacgaacgtggtggatgtctatatccgttatttaagaaaaaaagtcgattacccattcgaaaaacagctgattcacacagtgagaggtgtgggttatgtgatgaaaggataaagaatgagattaaaaaataagatccagctttatacgtcgttgtctttgtttttaatggtgctcttatttcatacagccatttattttattttttcgataaccttgacgcaaaaagatatgtcccggctgtctgaggtggctgaaaatatcgccattgctttaaaaaaatcagaagaagaaggtcttccatcttcggagcttctgaaagcgtacttgccccaaaatggcatgatccgtgtcgtgacagaaacgggtgaatcaaagctgactgtcacaaaggagtcaacgtttagttcactgcctttcacatatgaatctgggcagacagcagaaatcaaagaatacaacaagcatatgactgcgttcgctgcgatcccggttatttggacaaatggagagattgtgtcgctccaagtatatgaagaaatcgaaaatacggaagagaatttggcgttattaagaatgattttaatcgctgctggcgttttaattatagtgctttcctattttgctggccacattttaacaaaacaaatcgtacgccctattagtagaatgacgagcaccatgaaggcaagtatgaaggagaaggcgtttaaacgaatcaaactagcaggcgattcaaaggatgaattgtatcaaatgggacaaacctttaatgaaatgtcagaaatcctcgagaagcattatgagaaagagcagcaattcttgcatgatgcctctcatgaattgaagacaccgattaccgtcattatgagctacagtaatttactgaagcgctgggggcaaacacgtccagaggttgttgaagaatcctcccaagcgattcatgatgaagcgaaaaaaatgaaaaggctgacagatcaattgctgacactggcaaaaaatggtcagcctctatatgtggatatgaagccagtcgatcttggtcatttgtgcaagcagatatgccatacacttgaagtggccaccaatcgaaccattcaaactcatgtgcaaacagatcagccgcttattgtggaaggagacgaagagaaaatcaaacagcttttgaccatcttgattgataatgcggtcaaatatagtacagagccagttgatgtgacatgcggatgggcgggagagaagccgtttatttcagtcgttgaccatgggattggcataaaagaagaggatttgccgaaaatctttgaccgctttttccgtgtggatgaagcaagaaacagtgagacgggcggaacgggtcttggtctttcaattgcgaagcaaattgcagaagagcatagagctgagctgaaggtagacagccgaatcggcgaagggacaaccatgaccattcttttccggaaataaaataggtcttttctcatcaatttctcatttcctccttataaaataggaaataggaaggaggcgctgcatgtctagaaaaacgaaaatggtgcttgcgctcgcaggatgtctcgtcgttcttgctgcctttgcaatgctcatgattcaaaccattgatcaaaaaatattaagtgaagcagaaatcaaaaaaatcatcgcaaaagactacaatggaaacattacaaatattgatttaatcaatcataaacaggactatacattgacgctggaaaatgcaaatggcatctatcaaatcattgcatcttctgcaagcggtcaaatgaaagaaatcagacagaccaaaagctatcaaaagccaaatgaaaaaaatgctgagctccaggcagaggaagcggctgttaaaaaagtaagcggtactgtcatccaaaagaaagaaaagtcagatcgttttatctttacgatccaatcaaaaaaagaattatatcaagtcgatgtcgacaagcaaacgtttaaggtgcttgaagcagaaaagaaaaaaccaacctctaaagaaaagaaactgacgaaaatcacggttgaagaagccatccgaattgcggtaaaagaagtcggagggacagtggatgatgcagatcttgaaacatttagcggtatgctcgtctttgaggtggagctggatttgcctgacgggcgtgaggcagaggtgcttgtgaacgcatatacaggagacattgaaggtattacgtacgaaaactaatccttttctcatgattttctcatgtttctttcctttctttatcatcttgtttctttaagataaaggagaaatcaaatagaggaggacatgaacatgatgaaaaaagtactagtagctacagcattaacaggaactcttgtcgcaggtggtttcacacttcaagcgcaaaatacaaatcaaacagcacacgccgagcaggtggtgcaaaagaaatcatcgtttgtctcaaagaaacaagctgaaaaagcagccctaaaagtcgtgaaagggtatgtggacgatgtggatcttgagcgtaaaaaaggaaaatgggtgtatgaggtcgagattaaaaaaggcggctttgaatataaagtatatgtcgatgcgaaaacaggaaaagcgctgaacgatccagtcaaagaaaagaaacagaatgtgaaaatcactaaaaagcaggctgaaaaaattgcccttgcaaaagtaaaaggaacagtcacagattctgatttagataaagaaaatggtgtgtacttgtatgaagtcgaaatcaccacaccaaacggcgaggaagttgattttgagatttccgctaaaacaggcaaaatcctgaagcaagaatgggatgattaagccatcaccaaaccttacactttcatgtgtaaggttttttcattgggacaaactacgggaaaggaggcgagagaatatgaagaaaaaagaagaagagcagacaatggaccatgcggaatatgttccgcatcctgatggagaaggatatgctttgtttttgcatgattcctttcatctcctctcccaagaggatatgaatcagccagaagaggaataaaagacatgaaagggcgatggtcaactttgtctatcgctctttttttcaaaagtaagcgaatacatgaggaaacttggcatcttgcttattgacatcactgcgctttttctgtaatctcagtgtgtcaacaatatgagacttcgttaggtgaggctcctgtatggagatacgctgctgcccaaaaatgtccaaagacgccaatgggtcaacagaaatcatcgacataaggtgatttttaatgcagctggatttttcctatgccatacagtgctaaagctctacgattgaaggagcaagtgtttattttgttatgcttacaaagcgccttcattcggttgaaggtgcttttttatgggaaaaggaggtgtggggatggatcatcccgattcgagacacatagagaatatgtcaaaagatcagattgagacatcagatagaggagatcctgacccccgcacattctaagggattcgggtatctcctgactttggggaggtaacagcgatgatacaaaatattacgtacgatgaactcattttacgcatcattattttactaagagatggaaaacgaaaagaatttaaaaacatcatggaagaacttcagccatatgatatggcctacttatttaaagagcttccagaaaaacaccgcggccgcttcctcagctttttaccagtcgatgacgtgacagaaatgatgggtgagctggagcgggaataccaagaaatcgttcttgaaaaagtagggaaagacaaagctaccttcgtcacaaacaaaatggataacgatgatctagccaacttgtttgatgagatggaggatgagctaaaggatcagcttttatctaacatggaagcagaggaatcaaaggccgtccagcttcttatgaattaccctgctgagacagcgggacggatcatgaccaaccggtacgtttggattcctcagcattatacggtgcaggatgccgttgtgaagctgaaaagctttgcagaaattgcggaatcaatcaactatttatatgtgattaatgatcaaaaacagcttgtaggcgttctctcataccgtgatctcattttaggtgaaccggatgaaaaggtgcaggatctcatgtttacaagagtcattgccgttggagcctttcaagatcaggaggaaatcgcaaagctgattgaacggtatgattttcttgccattcctgttgtggaagagaacaatgtcctagtcggaatcgttacagtcgatgatatcattgatgttgtcattcaagaggcaggcgaagactatgagaagtttgctgcctctggtaaagatattacgttcgacacgccggcatttgtggcggcataccgccgtcttccatggctcattctgctcttgttcattgggctgatttcaggcagtattttaaattattttgaagatacccttcagcaagtcgttgctttagcgttcttcatgccgatgattgccgggatgacagggaatacagggacacagtctcttgccgtcgtgattagagggctttcaaaagaagaattaacgaaaaaaaccattatgcgtcttatttttagagagctgagaacaagtatttacattgggatcgtctgttccattattattacagtcgtcgcaatggtgtggcagggcaatatgattttaggttttgttgtcggctcctcactgcttgcaacactgattattgggacaatggcaggtacggtcgtgccgattattttacacagattaaacgtggacccagccattgcatctggcccgctgatcacaacattgaatgatattctatccttactgatctattttggaattgcaacagcattccttcatacactgatgtagcaagaagactgtaaaacgttacgttttacagtcttttttgaataaagattgcatatagcgcttccatcctttacattttaaggagaaggtgggagagaaaaatgaagaagtttttattcattttaatgtgcatggtattgctaggtgcatgttcaagggaagacgaggggaaagacagaagacttgtggcagcagagtatatgattgaagcgattaccgaaggagataaacgaaaaatagaaaacatctatgttgaaggtgctgtcccaagcccaaatgacattctaaagctgaaaaaggaatggggcatagagacgctttcttatgaagattttcaattggaagaagccagcattcacgtctttcatgcgaattacgaagatgaaaaaacaggggagaaaaaggcacttgccatgcgggtaatagaagatcctgaaaaaggcggtgtacggattgactttgtaggggtcgttgaaggaactgacgcttcctctcaatgaaaaattttattagaagacaaggtataatctaaaatgattttatttaaaaggatagaagagctgaaagaacttcgctctatctatcctcttttttaccacaaatgacctgatcacatatgagttatgcccattaactccataaatcgtgagagggcactggtcatgtacgaatcgcgacgccttataaacacagtgggcacgattctatgtggttccggtaatggatgacaggtaaatctgccttgcatccgagattcaaccatagattttggtaatacggtgactccaagcccgttttcaacgcatttaagcacgccctctaaagtgccatattccattaccttcataggagggtagccattgctctctaaccatcgctgccaacgccccaaatagatgcaatgcgcaaatgacgaaagcaatggttcatgcaagattgattctacctggaattcctcccgggagtagcttgtaatcagaacaagtgattcttccaatacagggtactcaataatgtccggatgaagaattggcccatcaaccaatgcaccgtctaccttgtagttaagaatagcactaacctgatctacagtaggtgccatatacatgctcaattctacttgtggaaatgtcttatgatattctgtaaaaatgattggcaatcttgtagaagcggttgactctatagatccaatgtgtaaagttccccgcggagtagaggaaagctttactgcttctatcgcttcttcaaaatcgtagagtaatttgtttacatatggcaacagttcacgtcctgcaggcgttaaggatatcttcttgtgatatcgatagagaagaggaacacctaattcttgttcaagacgttggattcgtgcagtgacattcgactgcacataatttaatttctcggcagcttttgtaatgctttgttcaatagctactgctttaaatatttccaaagatttaatatccaaaataacgctcctttttgcatcataaattgtgatgaactatacactattttttgattttacgtgatccaatagaataagtaaacttaatgatataagagatttatcatgaggaggagaattgaaaggtagagagttttaactaggaaaagataaaacaggcgtttccaattaaatgaggagggaatctattgatttcaaagattaatatccaagagaaatttttgcaaataaatgattattggaatcctagaataagtggagagttgaacgactcatacattaaaatggtaaaaattaagggtgaattcatttggcatcaccatgatgacgaggatgaaatgttctttgtatgtaaagggaatctagtcatccgttttagggatagagaaatagctcttaatgaaggggagtttcttgtgattcctaaaggaattgaacatcagccaattgctgaagaagaagttcatttgctcttaattgagcccaaaacgactctaaacacggggaatgtggtcaatgaacgaactgtttcgattcctgaacgaatggatgaacactagatcgttgcacttaacaggtgctttagttgaaaaagaggcagcaatcgctgtctctttttactacgttatcatacattcacttgtctttaattttaaagagtaagcgaatctttatttgtttatcgatttttgtaccggaagtgtgcgttaatctggccttccagcatttttttcttatattgtccgctttttaatgcctgttcttttttcttcatgtctttcaaaatctcggctgtttgcacaccgtcttctcgtttgttggcgatgtccattaaacgttctacatcagaaaaagaatatttacgcgtgcctcttgttgagcgctgggggtagatgagtctgcgttcctcataatatcggatttgcctgacggatagccctgttaattcactgacaatcccgattgaaatgacttttttatctttataagatacatcttcctgcgtcatatactcacccctgcaagtcttttcttcatattatacagaacgagaaggaaaaaaacctatcatttgtcagaaaatataacacataaacgaaaaaacgaaaaaaccatggaaggaaagataacaacaaatgtgaaatgagtgttgtgcgtgcatataatgatgatgagttgaaataggaggaggagcaaatgatggagcaaacacagatcatctgtatggcaaaagaaatcatcgcattagatatgaagagggatgaattactggagcgattcatgcaggtggcaggtcagaatgcacatgctcttctaagagccgtacaaaatgatttgtataaaagatcttcataagcacctggtccagatcacttgataggaggggataatcggtgcggcgtatcttaacagaagctttagcaaaggaaagacattattatacgaagcagctctgttcattaggagtttacagccctgatgcggccaagaacatgacaattagtgacttaaaaaaagagtatcacttctttttcaacaaaacagagcgtaatttgtgaaaatcccttgaaatgtgcgtatgtcacataaagggttctttttttgcgtgcttaatattatagcaatattgaattttgtagaaatttgacgaatacagtgtaaggaaacgcagttcctttacagattatgttaaactatgtcgcatcttgatggtttgctaaaaaagctttttttcgagatgattgtgaaaaataagaaggattttaaaagtttatatcgaaatcttatacataacacgaatggagtcacttatgtggttgaaagggttttcaaaaacgtacttctattttttacgaaaggctccaactgcaccgcaagaaagccttgaagttaaaaaaatattataagaggtagatatgtgatgagactatcgtttaatgaagaagaagtagaacgttcaatgacactttacaaggtatttgcaagagcatttaaaagcgtttcagaacacagcattagagacagcaaagagcatggatttaatccaactgaatttgccgttcttgaattgctgtacacaagaggtgctcaaaaacttcagcaaatcggctcaagactcctgcttgtcagcgggaatgtgacgtacgtaattgacaaattagaacgaaatggtttcattgaaagagagcaggacccaaaggataaacggtcggtttatgcccatttaacggataaagggcgcagttatcttgataagatttacccgattcattctcttcggattgcgcgtgcgttctctggcctctcgcgtgaagaacaagaacaattgattagtctattgaaaaaagcaggcattcacagtcaacatttattatttagatagaacgaaaaggtgccatgattggcacctctcagattgttgacaaagggctaaaatgatctttattttagccctttgtcttcttttcagcgtgacctgaaaacctttgaagtctaggaaggacgagcaccgaagcagagcgaatttgacattcgtgagcatcggagcgcagaactgacaacgaatgcgagggtttgtctacacgctgaaaggtgccatgattggcaccttttttatgtgtccagctgatgcgccggataggcaatgaatttttcgatatcggttgctggaaggggctttgcataataaaaaccttgcaggtcgtcacatccttgcgcagataaaagctgcgcctgcgcaaaggtttccacaccttctgctatgacttcgagagataattgatgtcccatcgcgataatggcacctgtaatctgttcagacttcgaatcatttaaaatatcttcaatgaaggatttgtcgattttcagtcgatgaatgggcaaatcctttaaatagcttaaggagctatgacctgtaccaaagtcatcaatactaatgcgaacgcccagatgtttcagcgacgtcagcacctgttttgattgcttgatattgtccattgtcatactttctgtcacttcaagctcgagcagtgacgatgtcaggttgtattttttcagtgtcaacttaatcaaatcaattaagtcttcagaattgaattgtttcgcagataaattgacagccacaggaattttcagcccgttgtcataccacgttttagcctgcctgcatgcggtatcaatgacccatctgccaatatcaatgatcagccctgattcctctgccagctcaataaaagcctcaggtgattttaaggaaccatctggtgccttcattcttagaagagcttctacgccagtcatctttcttgttttcgcactgacttgcggctggtaatgaagcacaaactgttctctctgaatggcatcccgcaactcaagctctcgatttaacctgtcttcacttgatctttccattgattcggtaaagaactcataccggctttgcttatgttttttggataaatacatcgccatatcggctttcctcatcaattccatcccatctttgccattttgaggtgagatggcgatcccaatgctgatagatgtaatgagctgatgattctggatgaaaaaaggacgttcaaattgacgaatgatattttgagaaagctgctcaattttgtgtgtgtcatgtcccatgtgagggaagatcattaaaaattcatccccgcctagtcttgcaataaagccattgtccggtaaacattgcgtcagtctgtttgcagctgctttaagtagtaagtctcctatgttatgaccaagtgcatcattaataattttaaaacgattcaagtcaagaaacagaacagccgttgatgttcctgtctcttcttgagcggagagaacatcatttaaatggttgatggcgtggcgccgattaggaagctcagttaacgcatcataatgtgccatgacatgaatttctttttctgcaatccgctgctgcgttaaatcttttaagacaagataaatactgtcaagtgtattgttgacatgaacaggtatgtaagtgacatgataataataaaaacgatctgctgctttcagttctgcttcacgtgtgatggctttttttgaccgggaaataaattcttcccacatctcagtcggcatcacgtattgactgacatcatcaccaatccaagaattgcacatttttaagatttgtttacctgagtcgttcgcagaaagcacctttcgatcgacagataacacgataatgccatcgatattatgtttaatgagcgattgaaaccgctgttcattttcctttaactgatctgactgcttcatgattcggtgatctatataggcaccaaagatcatcagtgtttggacaatcagtgtcatcaagccgatgaaaatcgacagactgaatggcgacatttcaagagagccgcctgcagcggactgtccatctgaatgaaaaaacatagtagaagcagccataccagtataatgcatgccagaaatagccccacccatcacgagtgcaccagctatttttaacagatgatcctccttttttttctcggatcgatggagccgaaaaaagagatgcagtgaaaagaaagatgccagcgcagcaatgaaaaacgaaagaaaaaagaggactggatcatagctgattgagacattggccattgattccattccaagataatgcatgctgcaaatagcagagcccatggtgattgaactaatgagcagccgtcttatggagagctgctcttgaatgcatatcgagaatgcgatcaaagaaccgacaaaagacgccaaaatcgataaaatcagtaagggagtttcatatgtgatgccggtttgcatgtgaaatgccatcatgccaataaaatgcatcgaccatatgcccatccccatgatcattgcaccaatgaccagccatacctttttctttgcaccgcttgactgtatcactcggctggctaactgaagagctgagtaggaggccacagcggcgacagcgactgacagaaagacaagccatccgttgtagcttcctgttaattgggtcatgtgagaaaacctccagtatcttaaaacagacatatacttaatatatcggatcgaatggcttctgtgttcacttttccttcacttaaataccacaatcaacgtttttttcacgtgtcttttatagtaaaatcaaatttaatgtaaaaaaacgacgaaaagtgaatcgtttcttcggttttattcgtttaatatatggtgtgattctaaaagagatagaatcgtcaaacgattatgtgtgaaagggattgataaacatcgaagattttattatttctttagctgatgcttttaagaacttgtcgtactttggcatcttcctcgcattatgcattgaatttgttcctgctgaagtggttctgcctcttgcgggttactgggtctcagaaggggacatggccttcatcggtgttgtggctgccggctccattggcggcgtggctggccctttgaccttgtactggttaggacgttatggcggaagaccctttttaaataaatatgggaagtacttttttgtcaaacctgagtcgcttgataaatcggatgctttctttgaaaagcatggtggtttcgtcgcctttagcggccggtttattccaggggtcagaacgcttatttccatcccgtgcggtattgccaagatgaatgtgtgggtcttttgcttgtatacgtttttggcgattacgcccattacatttgtgtatgtgtatcttgggtttgtgctcggggagaactggaaagaggttggcgctatgttagatccatatcttttaccgattgggatcggggttgtgttgttgttcatgatgtatatatggctgaaacgtagaaaaagaaaaacagaaacaccaacggcctaatcactgaaagtcacctgttgacaatacagtgtgtattgattatgatataagtaatctaaatattcttaaatcccaccaaaggggagtagcgtccggttttaccggaaacaaagtcgtcattacatggacttacgttccatcggctttgttggcatgattctacatatcacatgtctagcaagacctttgccattacaggcaaaggtcttttttgtattcataagcctttgtctgttgtgggacaatagaaaaaacaaggaggaatgatgatggatgcagcaattattttagagtacgggtgggttcttctcgtactgattggattagaagggattttagcagctgataacgcgctggtcatggctgtgatggttaaacaccttcctgaaaagcaaagaaaaaaggcattgttttacggacttgcgggtgcgtttgtcatgcgatttggttccctgtttcttatttcgtttttagtggatgtgtggcaagttcaagccattggtgcaatttatcttctttatatttccattcaccatattttaaaatcgcacgtatttaagaaaaaggaatcagacacaaacatgaagcaaagcggcttctgggcaacagtcgtaaaagtcgagcttgccgacatcgcttttgctgtagattccatcttagcggccgtcgcattagccgtgacattgccgaaaacgagtcttccgcaaatcggcggactcgatggcggtcaatttattgtcattcttttaggtggtatcatcggtcttatcatcatgcgatttgcagctactgtctttgtgaaactgctcaaaacaagaccgagcctagaaacagcagcctttgtcattgtcggatgggttggtgtgaagctcacgctttatacactgtcacatccagctattggcgtcgtatcgtctcattttattcattcaacattatggaaagtcattttctggacagtgcttctcgcaattgcagcatttggctggtttttatcaagcccatcaagaaaaggcgggcaacaaaacaaggaaaaacaagagggacgcctagaagagtaggttttttgaaagaaatatcatttcattttcataacacgtatattacaaataagggggagatacccccttatttctttgcttttagacgaaacattgtaaagtagatgatgatatacatgtcataattgagtaacaggaaatgaattcctcatttcttcctttgcgcttccctcataaattagctatcataaatgagtaatatagggagaactgaggtgaaaccattgcttagccttttgtttaaaaaaggaaagaaaaagcaaacattagagcagtcggctatcagtattcaacaaggtgatatcgagctgcaaaatgcattaatagagcaatacaaaccatttgtcgctaagacggtttcatccgtttgtaaacgatatatagatgaaaaagatgatgaattcagcataggcttaattgcctttaatgaagcgatagaaaagtactctgccgaaaaaggaaactcactccttgctttcgcagaattaattattaaaagaaaagtgatcgactatattcgaaaagaagcgagaaatgcgccaacggttcaaatggacctgcaagaaagtgaaaatggcgagtactctcaaagcatgattgaagcagagctgtctacaaatgaatatagacgtttaattgaacaagaacatagaagagaagaaatagaacattttaaagaacgattaaaagtatacggtctcacgtttcaagagctgcttgaacattcaccaaagcatgcagatgccaggcaaaatgctattaaagtagctcacacactcgttgaacacgatgagctcagaaccattttatttcagaaaaaacaattgccggtcaaacagcttgaaaagctagtggaagtcagccgcaaaacgattgagagaaatagaaaatacatcattgcgatggcgatcattatgacgggtgattatgtgtatttgaaagattaccttaaaggggtgcttaattcatgagaagaggcattatagtagagaaaaacaaaaaatatgtcacgctgctgacccctgatggacaatttctgcggacaaaatatgaacagcaagactatgaaatcggtcaagaagtgacatttccgaatgaatcacgtctcgaaagaaaaagagccggtttttttgacctgcttcgtttacgtccgttaaatgcaggaatcctatcaatcgcagcgattattgtcgtgatttttactatgatgccatctttctcaagtcaaaaagcatatgcatatatgacaattgacattaacccaagctttgaactgaagcttgatcacgattatcaagtgatcggtgtcacaccactgaataaagatgcgaaacaagtactggccagtatgaaggatttagaaaaaaacgacatgaccaaagtcgtgcaggaaatcatagatgactgtgacaaaaaaggttacgtgaaccactctaagagcatttatatttcaacggtttatgaaaacaagcaggaccatacatataaaaccaacgtcaaaagtaaaattaacaccatctctggtgaatatcaaaagcgcgattacaagctagaaactgtagaaagtgacctggaaacaagagaaaaagctcaaaaggcaggcatttcaacaggcacatatatcagaaatcaagaaatgcaagacaaagatcaagaagacattcaaaaggatgaagacgcagcagagagtgatgctgtcaaagaagaagagcctaacaaagatgatgaagatcaaacagacaaagacaaacaagaagacgtcaagacagacgatagcgaagagatgaagccagatcaagaggctcctgaagctgaagacaaagagcagaaggatcaagagagggaagagcaaggatctgttcaaaagcctcaccaaacaaaacctgatgatgaaagcaaagacaatcaaataaaggaagaaaaggatcgctctttcgataaagaacaaaaaaaaaatcactcaacggaacctgatgataaaagaaatccaaacggcacatcacgtgatggcgctgaaaagcacacaaaaaaaaacgacagggatcagaaacggccgtccgctgaacgaaaaagagaacatatgaagcaaggaaaaggtgtaccgtccccttatcgtgagaaccggggcgagcacacatatgaacaataaaaaaacgccagaatagctccggcgtatttcaccatgtttttatttagattgattgcccatttgtgattgagcctgttgaacgagtctttttgtaatttcaccgccaacagaaccgtttgcacgtgcgactgtatctgaaccgagagtcacgccaaattcttgagcgatctcgtatttaaattgatctaatgcttgttctactccaggaacaagaagttgatttcggtttgccatgtccatattcctcctttcacctcatgtttgttgcgccttcttattttgaagaaaacagcgtacaattatgctggcaattgctgcacaaaaaaccgaggtgatgattcacctcggttcttctttatcctgatgctgcagtgtatgaaacatcatttcttgtgccgtactttgcaagtgtgaagtaaagacagaaaaaacggttgaactgataatgcctttgatcaaatgccattggtgctgtgtcaattcagaaaattcttcacggagcttatctgtctgttcctctgtgatttcccgtaagtttgtttcttttaacggaaaatgagtatgatgataaataaaatcaaggacatgcgcatatgcttcataaaagcgcagtggactaataatatcatcagttcgatccgtaattgtgttaaataaggcagataagatggtacggatggcatcaaagtcaaaaactgattttaaatctctaacaattaataaaataacgacctgatcaattgagtacttctttccaagctcagggtggccaatcatatctttaatatcacgtttgatccagttttgaatcgctgtcgatttaagagaagtcagttcgcataggtttcctaattctacaatttcatttgtggagagtccatgctctgatttgtgtttccgacgttcaagcctctcaaaaaaagaagggatttttagctcgtcatgttcgtgatgtttgtctttttttacagataaatttaatagctgaagcggagtcagatctccctctccttttagagaatagagaagacttgtcatgtcaattctcgttaatttaaaagcacccattattccacctcgtttgtacgtcaaaaacgtcataattgatctaattcaacatcataatctctttttgatgaaaatgcaaaataaactaaaatccagaaagcggcgtcacaatttgttcacttttcagctgtagcaaatgtcgtaaatattgaagtgacggggcttaagccgttatgataaacataagtaatgattcctttttccttgcaatttgagacgtttatttttataattttattaataagttcaaatgaacttaatatgacagcggaggttatgtatgggtaaaagaatatttctgtttatattaacgaacattcttgttatcactacgattggtattgtactatcggttattagtgcagcaactggtgttggttcttatataggagcagatggtggaattaattttgtggcattgctagtattcagtgcagttgttggttttgttggctcgttcatgtcacttgcaatgtctcgctggatggcaaaaatgatgatgggtgtgcgcgtgttaaaccctgaaaaggattcattaacatatgatgagcagcagcttgttgaccgcgtgcacagattatcaagagcagcaggcctttctaaaatgcctgaggttggtatttatcaatcatctgaagtaaatgcttttgcgacaggtccttctaagagaagatcacttgttgcggtttccactggattgcttcatgaaatggatgatgcagcagttgaaggtgtaatcgctcacgaagttgctcacgttgcgaacggtgatatggtgacaatgacgctgcttcaagggatcgtcaacacgttcgttgtcttcctttcaagaattgcggcatggatcgcaagccgctttgttccgcgtgaagagcttgtgccgattgttcattttatcgcagtgattgttttccaaatcattttctctatcttaggaagccttgtcgtgtttgcatattctagacaccgtgaattccatgcagaccgcggcggagctgaccttgccggtaaagataaaatgattcatgcgcttcgctcacttgaggcgtatacgtcaagaatcaaagatgatgatcaaacagcagttgctacgcttaaaatcagtggtaaacgaaaagcttctcttttctccacacaccctgatttaaacgaaagaatcagaagactagaagcaaaataagagagacgaaaagacattctgttacaggatgtcttttcttttttgatgaaaaagtaaataaagcataaaatacctttaaaatcatgtctcttttcattaaaatgataagtattgaaaaatgaaagttaaaagaaggaatgacaatgaacccaattaaaaagctaattgaccggctatcggctttccagctgattgccctttattattttctcgctgtgaccgtctcatttattcttctaagtttgccagtcgctcatcaagatggggtgaagtggacatttatcgatgcattatttacggcagtgagtgcggtaagtgtcacaggactcaccgttgttgatacctcccaaacatttagtgtggcaggtatgtggatccttgcgtttgtcctgcaaatcggaggtatcggcattatgacgctcggtacctttgtgtggattgtcatgcgaaaaaggatcgggattaaagaaagaaagctcatcatggcagatcaaaaccagagcaatttatcaggaattgtgaaattaatgaagcaggtcttatatttaattttgctcattgagtttgtaggcggtctgattttaagcatgtattttctcaaatattacgatgtgcaggcagcattcttacatggcttcttctcaagtattagtgcgaccaccaatgggggcttcgatattacagggaactcgctcatcccttacaaagatgattattttgtccaatttattacgatgctgctgatcatctttggagccattggctttcctgtcctcgtagaagtaaaggattacttatttaatcaggaccgaaagcacgcatcgttctcattgtttacaaaaataacaacgattacgtttggcagcttagtcattgttggcgctattgggatttatgcccttgaagcccggtttacgtttttagggaagagctggcacgaagttttgttttattcattgttccaatcgaccgccacaagaagtggtggactttccacattagatattactcaattgacagaaccgacgctgttatttttatgtctgctcatgtttatcggggcatctccaagctcggttgggggcggaattcggacaaccacctttgcccttaatttactcgcactgtttcattttgctcggggaaataagtccattaaaatcttcaaaagagagctgcatcaagcggatataaacaaatctctaatggtgacgatgatggcctttatattggtgtttggcgctacattcttattaaccttatccgagcaaaatacgcttcttcaaaatttatttgaagtctgttctgcattcggaacaacagggctatcactagggattacctctgagctctctgttttcggtaagtgtatcattatgatggtcatgtttattggacggatcggcattccaagcttcttgtacttaattggccgaagagaaagcgaagcgaattaccattatccgaaagagcgtgtcatcatcggctaaacagcattccgagcgaatgctgtttttttatttccattatctaactggctaaatcacgcgagatgttcgcaatctataggtaagaggtgaacgagacgtgctggatgtaatatggaaagcaattgtcatgctgctagttggtaccttgctgctgagaatagcagggcctaaatccattagtcaattaactgttcaacaaacagtgatcatgatttcaatcggatcgattattatccaaccctttattgagcacaatttacttgaaacgatttatgccgctgctacatttatcattgcactcgtcatcatggaaaaattgtctatccaatctgatttctttgaaaaattggtttcagggaaatctgtggtcattttgcaggatggagaaatgcttgatcacaagctgaagaaaacgaggctcacaagggatgaattcaaaatgcgcttaaagcagcaaggcatcacagacatcagctgtctcaaaaaagccaccctagaagccaatggacaaattggctatgagttaaagccagaagaaaagcccgtgacggtcaaacaaatgaaggaactcctagaccaattaagagaagaactaaatatgttaaaaaaggactgatttcagatgaaaagaaaagcagcgaaaaatgaagcactgacaaataatatgacaccgacagaaagcatggcacatgatcaaggacaaacccaatttgatgaacaatcaagagatcgtcaggcaaaccgaaattctcacaaagggaaacaagggggaggatctcgtgactaaaaagcatgtgaagagcaaggacatgaaagaccataagaggccaatggacccagatatcttagaagaggaatttggcagtgagcttggagatatcaacagcagcaaatggattgatactcttgtaaaacctaagaaagatgctgaatgtcacaatggacacatggatgaaaaatagaaaaaacgatcctcgcgggatcgttttttatttgatataactgccttgcctgccggtgattgtacgcaaaagattgttcattttgagctcaatcactggctgtgcaacgtttttaacaaaggtgctagacagggtaaaggttaacagaatggtcagcagcaataacatcagtacacttgctgcattcagggcccagtcgtcaaaccaagtcgttctaagcagcttgatcacaaagccatgtagtaaatacacatataacgttcttgtgccccattttgtaaagaagaaacggcgtgttggcactaatgcaaagaagctgaatgtagcgccaaatgcaagcatgtaccatgccattcgtttcattgccgcaatcattccctcatctccaagagaagcatatgactgtgatccaaataagaaggaataatcaaattcatagaaatagcaaaataaaaatacagccattaatacaagaagtgctgccagctttcctttgcttgtacggatgaattcaaaatgctgcttttttaaatagaagccagctaaaaacatcggcaaaaacacaaacgtacgcgataagctgagcgtattgctgatgctgtccacgtaaccgacaagtaacgcaattgacaaactgacgatcatcgcccagtgaaacggaagtttagaaaaaggaatgagcagcaaattccaaaaaaataaactaattaaaaaccataaagaccattgcggatcaattggatttaaattggccatgctttgatcctgcaagagataatagtaaactgaatagatcacctgaaaaattaaatatgggatgatcagcttaacggcgacttttttcataaaacctggctttctaaagccttttgcaaagaagccggaaaccaagataaaggcgggcatatgaaaagtataaataaacttgtataaatagagcatccaatcattatcatgaatgaatgatcgtaacaaatgaccaaaaacaactagaaaaatcagaagaaatttcgcattatcaaaataactatctcgtgaagatgccataacatcacctttcctgcttgatttcaaacataaatgttctatgtgcactgttcccgtatttgccccattttaaaatacattttggctcatttcgctatttgatgtgaaattgtagaacggttgtaaaagaagcgtaagaaaagagaattgcagttcgatcctgtcatccaaatgaaataaatgagacagtcttcgtgtaaaaagttatttttttttatgagtcgaatgaaggaacaatgaaaatattgtagaaatattgtagaggaatgaggctggaaaaggagtgtaagagaatgactgaaacgctcgatggcgcagaagatatcagaaaattagaaaaagagaacgaatatttgcgaacagagttgatgcagcaaaagaggctgttaaataagacgttagatgccattttcatatttgatcagcacctcaatattatccaagccaacgaagcgacatgcaggcttgtacagacatcgaaagaagacctcctcaataaatccgttctagatttcctatacggcatcccgaaagacaaaattgaatgctcccttgatttattttttcgaaaaggaaagttaagaagagaaatctccattcagcttgaaaacggggaaacaaaatacattgaatttgtcgcagagcatgacgtcgtgaatcagcaatatatcgtggtcatgcgagatatttcctcaaagaaaatactagaacgagaacgctccatgaatgagcagctgttcaaagatttgtttgaccgagccattgacgggatggtcatttttgatcaggatggctgcatgatcgacgccaatcactctttttgtcagagctttgagctgcaaaagaccgatttaaccgatcgttatttaaatgaatttgtcgaagatgaaaatcttccagccttgcagcaccttttaacgtcgcttaaagaaacagggaaagccaagggagagcttcccgttacccttcaatctggccagcaaaaattattcgagctcaccattacatcaaatgtcatgagcggtttttatatgtccatcatgcgggatattacagaaaaaaggttaatggaagaaaagctgttaaaaagtgaggaacgctttagagaaattttcgaaaatgcaatggatgcgatcatcatatgggcagatgatggagagattgtgagagccaatgaatcagcctgccgaatttttgaattgcctatgcactcactgattggcaagaaactcacagactttctcgtgaaatctgatcagagatataggccgactagaagacgttatattcggaatcatgaaataagggaagagctgttgttcagaatggcaaatggtcagtttaaagagctcgagtttacatcaaagcatgcggtattagaaggacagcacttaaccattttacgtaatgtgagtgatcgaaaaagaatggaagaggagctgcgcgaaagtgagctcaaattccgtaaagtatttaatggatcaatggacggcattgttctttttgataaccagtaccgcattatcgaagtcaatccatccgcaagcgagctgctcggattgaaagacgatcatttaacggaaatgaaccttttccatatccttgcgccttatcaaattgaacatttggcacagcctgctcaggcgatgtcgttagatgaaatggacaatgaagttccgtttgtgctgaaccatccagatcagcgtatattggaattctcttttaaacgcaacattattcataatatgaatttggcgatctttagagatgtgacagagcggaaggaattagaagagcgggtgagaaaatcagatacccttcatgtggtgggagagcttgccgctggaattgcgcatgaaattagaaacccgatgacagcattaaaaggcttcattcagctgttaaaagggaatatagaaggggagtattcgctctatttcaatgtcatcacatctgagctgaaaagaattgaatccatcatcaccgaatttttgattttagcgaaaccgcaagccatcgtatatgaagaaaaaaatgtggtgcaaattatgaaagacacgatggatcttttgcacgcacaggcgaacctcggcaacgttcaaatgcatctcaatgtgttggatgagattccgctcatttattgtgaacaaaaccaattaaaacaggtctttattaacattttaaaaaatgcaattgaagtcatgccgagaaaaggaaatgtctatgtgagcattcagcggaagggcgaagagcatattgtcatttcactgcgggatgaaggctgcggaatggcagaggacaagctcaagcgtctaggggaaccattttatacgacaaaagaaagaggaactggacttggcttaatggttagttataaaattattgaagagcatcaaggaacaattgaggtagaaagtgaggaaggggtaggaaccgtcttccatctcacgcttccactgaggcagaagaaacaagaaggagagcactaacgtgtattataccgtctatcacgcaccaattggggcattatacatactagaaaaagacgatgccatcatcgaggtgatgtttgatgatgagccatttttagtaaaaaagcagaaagccgatctaaaagaagaagaaacgcctgtattacaagaagcgaaaaagcagctagatgaatatttcaagggagagcgccaagtattcgatctcccgctcaagcaaaagggatctccgtttcaagagcaggtgtgggaagcactttcgactattccatatggtgaatcaaaaagctatgcagacattgcagaagcgattggcaacccaaaagctgtaagagcgattggacaagcgaacagacgcaatgcattacctatttttattccctgtcacagagtgattggaaaagaccgctctctgacgggctatgcaggaacaaaaacagacatgaaagcggtcctgctagaattagaaggtatcccatttgttcaaaaataaatcgattgacctgttccaaatgtttgtcaagcgacatatccttttattaagctaaaaaagttggttgagggaaaaaggagggcgctagggaatgttttggggcaaaaaaaataaaatgtatgccgtcacatcactatgtgtcaaaatgaacgttttgacagaagaacagaaaaaagaaatcttagcaaaaacgagtgaaataaaaaagcgcggtgctcttaaataataagtacacggcgctttttttatgatcagagtgagatgttttcagcgaacagagtatcaatctcttctgtatagttcgatgtgataatccctttctctgtaatgatacctgaaatgagatggtgaggagtgacatcaaaggcgggattgaatacctgaacatcaggcggtgcaatttggacgccgtttaattcctttacttccagcggatcgcgctcttcaattggaatatctgccccgtcttgggttgatacatcaaaggtggaaagcggtgcagctataaaaaacggaatttgaaaatgcttagctaaaatggcgagacttaacgttccaatcttattcgccgtatctccattacgggcaatacgatcagctccgacaatgacagcagaaattttcttttctttcatcgtatgggctgccatgttatctgtgatgagcgtcacatctacgccgccttgcatgagttcccatgttgtcagcctagccccttgaagaacagggcgtgtttcacaggcataaatgtgaagatcgagatttttctttttggctaaataaaatggagcaagggctgttccgtaccggcttgtggcgatggagcctgcattgcaaatggtcataatacgatcacccgatttaaagagctggagtgcattttgaccgatttgtctgcatgtttcttcatcttcaatttgaatttgaatggcttcatggacaaggtctgttttggctgcattgaccgaagctgcacgctcaatgcgctgcaataatcgctctaaagcccaggctaaattcacagcggttggacgagcactgtttaaatattcttttatctgaatgacttcttgtttaaaaacatcaatttcttctgtctcaatgtcttgggcactgagcgccagtccaaaagctgctgtaatgccaatggcaggtgctccccgcacttttaacgtgacaatggcatcatacacgtcttcttttgtatataaatgctcaaactcagtttcggccggtaatttttgctgattcaaaatgttaatatggttttcttcccattcgacagaacgggggacttcaaattctttagacaaaacccgtcactcctttacagattgatggaataatgcgacgaggtcagacgctgcttccactgcatgatattgtttgatcattgtttttccgagcgttagtgctgcttttttctgctgaatccttctagatggtgatggaatcgcatcgagatcagcggcatgagcaaggccgattgttcggcggacaagctcacagcccgcaaagcctgccgcttcttttaaaatacggtcaaaggttgttgctaaaaaactgtcagatacactaaatgcttcaatgctgtcttctttccaagcttttgcgaacacttctttgaatgtcgtccatacattgatgacatggtcaaaaaggtgctgctgatcgtgttcattctcacgagacaaagcattcaggaacaggttagcgataaagtggccaatatcgaatccaaagggaccgtaaaaggcgaattctggatcaatgatttttgtttccgtctcatttgcaaaaatactgcctgtatgaagatctccatgaacgagtgtttcagcagatgtcaggaaaatacgcttcagttcggctgctttggcctgcacttcaagatctgcccaaagcgcttcggcagcttctcttaattcttcttcgaaatcatttgtgccgctatcaaagaaaggatctgtgaagacgagtttttcagtaatgtcacaaaggtccggattcgtaaattgcttcacaaattgctttttgattttaggatttgtggcaaagtcagaagtgtaaaaaagtgtttttcctaaaaattctcctacatgatcggataaatgcggatattgttttccggcaattagcccttttctgacgatttccaggtgtgatagatcctccattgccgtcacagcaagagctgtatctgaataatagactgcaggtacaaggtgcggcgtatattctgactgcttgatcagggcagcactttcaattctcgcacggtctaatgtaagcggccagctctctccgaccaccttggcatagggcagggcctgtttgatgatcaatcctttttcttgtttgtgatcaaaaatatgaaagacgtaatttaaattcccgtcaccgatttccgtacatgtcaaatgactgctttcttggatcaagccaagtctaattgcgagtgcaactgccgagctttctgttaattcttcatatgatgccgtaagtgtaaccaattgctatccctccaaatcatataaaaaagcctctttctcctgagagaaagaggcttgatggcgtgtatgctcaaagcctctcttatctctcagcacatacgtctgatggaattagcaccgtgccctataagacaattgtcttggcgcttacttgctgcgccccacttcacagtggtattaacggtcggttgctgttggggtcaaaaggccaaatccctcgcccaactctcgataagagaaatcaatatgtaattatttcgtgtctgtttgcatttcttaattcaagatattatcagagctgcgcttcacatgtcaatcttttttcaaaattgctttacaattcataaaacaatccattacagtgtttgtattgttacgtaacttgaatagaaggtgaagaaatggaattccagcaatcagatgtattgaaacaattaccgaaacaattttttgcgtctcttgtcctaaaggtgcagaaaaaggtgcaggaaggggcagatatcattaatttagggcagggaaatcctgatcagccaaccccttcgcatattgtaaaagccatgcaggaagcggtattaaaacctgaaaatcatcaatactcgtcattccgcggaacagcgaaattaaaaaaggctgccgccgccttttatgaaagagaatatggtgtcacgcttgatccgatgaaggagattgcgattttatttggcggaaaagcgggacttgttgagctgccgcaatgcctgctgaatcctggagatacactccttgtcccagaccctggttaccctgattattggtcaggtgccgtgcttgctggagctcagatggtgacgatgccgcttcttgaacaaaatgattttttacctgactatgatcgattgcctgagaatgataagaaaaaagcaaagttgatgtatttaaattatcctaacaatccgacaggtgccacggcaagtcgtgcattttttgaagaaaccgttacgtttgcgaaagatcacaaactctgtgttgtccatgattttgcctatggcggcattgggtttgatgggaaaaagccgatcagctttttgcaaacagatggagcgaaagagacgggtattgaaatttatacattgtctaaaacgtataatatggccggctggagagtaggttttgcagcaggaaatccgtctgttattgaagcgattgagctttatcaggatcacttgtttgtttcactgtttaaagcaactcaagatgcagcagcggaagccctattaagcgaccaaacgtgcgtacaggtgcaaaatgatcgatatgaaaataggcgaaatgtgtggatcgctgcatgcaaggagattggctgggaggtcacagcaccaaaggggtcattttttgcttggctaaaggtgccagaaggatatacatctgaatctttttctgacgtattattagagaaagcacatgttgttgtggctccggggaatgggtttggtactcacggtgaagggtatgtgagagttgggcttttaacaagtgaggagcggttacaagaagccgctcggcgtatcgctgccttgaatctgtttgaaaataagccattgacaacataaaaaaatggtgcgataattcagacaatatttaagaaaattgaatattcttatcaagagtaggcagagggactagcccaatgaagcccggcaaccgacttccatgaagcacggtgctaattcttgcagcaagcgctgagagataagattcggatgaatgacacgaaacaacctctttaaggcgctgacaaagcacttgaagaggttttttattgaccatatgcatgacgaaattgaaaggggattcctagtgagtgaattactggcaacatacgtattaacacatcgagaggatgaacaagtgaaccgaaaagcggagcagatcgcacttggtttaacagtgggatcatggacagatttgccgcagctcaaaaaggagcagcttcaaaaacataaagggcgggtagaaaaagtatcagaaaaggttgcttcagccgaaaatggcgtatatcaatctgagatgaccattgcttatcctgaggctaacttttcagctgatataccggccgttttgacgacgatctttggaaagctttcacttgatggaaaagtgaagctagtcgacatacaattctcggatagatttaaaagaagcctgccaggaccggtatttggaattgatggcatacgcaaaaaattaggcgtgtttgatcgtccgttgttgatgagtatttttaaaggtgtcattggccgtgatatggcggatttaaaagagcagctccgtttacaagcattaggcggcgttgactttatcaaagacgatgaaattttatttgagagcccgctagccccttttgaagaacgaatcaaagaaggaaaaaagatattaaaagaaacatatgaagagacagggcaccgaacgttatatgccgttaatttaacaggcagaacctttgaactgaaggatcgagcaagaaaggcagctgaactcggagcggatgcactcttattcaatgtctttgcctacggactagatgtcatgcaaagcttagctgaggatccagatattccattgcctattatggcccatcccgcagtaagcggcgctttgacatcatcgcctgaatatggattttcgcattctcttcttttaggtaaattaaatcgatatgctggcgctgatttgagtctttttccctcaccttatgggtcggttgcacttccgaaaaaagatgcctttggaatctatgaagcttgtgtaaaagaggatttggttcaaaaaacgttcccagtcccgtcagcaggcattcatcctggaatggttccagtattgattaaagattttggactcgatcatgtgattaatgctggtggaggaattcacggacatccgcgtggagccatcggtggagggaaagcatttcgatcgatcattgatgcggtgatacatggagagtcgatccaagagaaggcagcttcttgccaagacttaaaagcagcacttgaactatggggaagggtagcagaataaatgaaaaaaccaattgtatgttgtgattttgatggaacaattacaaaaaatgataatatcattcgcatcatgaaacactttgcaccaagtgaatggacgaagctgaaggatgatgttctcacaaaggagatcaccattcaagaaggcgtcgggcagatgtttcaattactgacgagtgatcaaaaagaagctattcagtcgtttattttagaagatacagagattcgagaaggattcaggcaatttgttgattatgtgaaaaaggctgatattcctttctatgtgctaagcggcgggatggacttttttgtctatcccatactcgagggcattgtgggcagagacaatatttattgcaatcatgcctcatttggggaagatcatattcagattgaatggccgcatgtctgcgattcgcaatgtcaaaatggctgcggatgctgcaagccgtcaatcattcgagagctgacccatgagaaggacttcatcatcatgatcggagattcagtcaccgatgtggaggcggcaaagcatgcggatctcacatttgcgcgcgactacttgctgaatgaatgtaaggagcttgggcttgtatataaagagtatgaaacatttattgatcttaaagcgcaatttgaacaaataaaggaagtgaaggaatggcagacgcaaagagcaagcgctggcaggagctagcagacgtcaaacgtgaactggcacaaagagactggttttacggaacaagcggcaatttatcgatcaaggtgtcggatgatccaatcacgtttttggtgacggcaagcggtaaagataaacgaaaagaaacggatgaagattttgttttagtgaacgcagcaggcaagcctgatgatccgaacgaacagcttagaccttcagccgaaacactgcttcacacatacgtgtatgagcggacgaaagcaggttgctgcctccatgtccatacaatcgataataatgtgatgtctgagctgtatgggggtaagggcgaggttcgtttgaaaggaaacgaaatcatcaaggcgcttggttactgggaagaggatgcagaagtgtcgataccgattattgaaaatccagcccatattccgcatcttgcagcacaatttgcaaagcatctcactgaagagtcagaatcaggtgcggtgctcattcgaaatcacggcatcactgtctggggaaaaacagcctttgaagcaaaacgagtattagaggcgtatgaatttttatttagctaccacttaaaattaacgctttatcaaaagcagcttgtcagataaaaaggaggaaaagcacatggcgacgattttgattcataacgaagaaaacacattacttgaaaacgagcaagaggtagcagcatatttagaaaagcaaggggtcatttatgaacattgggatatcgcaaagctgccaaaccggttatcagaaaagtatgatttaacagatgaggaaaaggaagagattttgactgtttttcaaaaggaaatccagcgtatatctgaaaaacgagggtacaaagcgcaggatgtgatttcattatctgacgccacaccaaatctagatgagctgctccaaaattttaagcgtgagcatcatcatacagatgacgaagtacgttttattgtaagcgggcatggaatctttgccattcagggtaaggatggcgtcttttttgatgtgagactgaatccaggcgatttaatttctgtcccgccacatattcgccactactttacacttcaagaggatcgcaaagtggtcgcagttcgcatatttgtcacaactgagggctgggtgccaatttacgaggaagaaacggtttaatgacaggagctgatcattccgcatgaggcggatgatcagcttttttttaggaaaataggcataaaatgagaaagaaaatagttgattttgatcttctgcataggataaaattctgtttaatccatgtgtcagtcctgtccaaatttgaagtttacccccaaattagattgggtaagaggtctttaggctgtaaaaaattaaataaaataagcatatttaatttaatttacaaataaagtataattttggtgtcggatcattttgagcatagacagtcgaattcattgcgggagctgagatcatgaatatttatgtaaggaaagaacaattgctgatgtccattgatgagaagagaaaacagatggtagaagctgctcaagcggaaggctacactggtgagacgacaattaaatatagtcaagaactagacaacctgatgaatgagtatcagtatctcctttttcatgagaaacaatctgccccctcctttcatgatcttgtatctcaaatgagtcttctatctgtgaaccgcccttcttattgacatgaaaaaccggtcttgcctaagcaaaaccggctgaatgtttcaactatgctgagtgagcagaaggaagcatgatcatgacggttgttcctttattcacttcgctttgaatatcaattgtcccgccatacatcgaaataattcgtttacacacgacaagcccaagacctgtacctttttccttcgacgtaataaaaggaaggaagatatgctttaacatttcttctggtatgccttcacccgtatctttcactttaatgatgacatgttctgtttcagcctcaatcaaaatcttcaaatgaccgccatttggcatcgcttctaacgagttcttcgctacatttaatacgacttgtttaatgtgatcctttgtgcaatataccccaacatcctgaatcgtattaatttgcaaatcaacctcaacattataaaggttcgcctcagagaaaacgatcggcatgatctcacttacaatttcttttacagagttattctgccatttttctgccgttggtttccctaatacaagaaactcactgacgatttggttgattcgtttaatttcttcttcaatgacagaaaaatagagctgatcttcttctgaatgatacttcttttgcaaaagctgtataaatccgctgatccctgttaatgggttgcgaatttcgtgtgccgtacttgctgcgagggttccgattaattcaagcttttgcgcttcattttggtgacgctcctgctgggtttgacgccttaaaatgatatattgaacaagtgtgaataaaatatttaataaaataaaagcactggataaagggatcaacataacagacagcacttcacctgtagacgcgcgctgcggaaagacctccagcttccagctgttttcatctaaatatgtagacacggtgctgccattttctgatgctggctgcggaccacttgtaaacaccacatgtccattttgattcagcatcttaaaatgaagatcagggttcaatacattcataatatttcttaaataatcaatttgaatggcggcgactagcacattggtgacttcttcattttcatctagcacaggcacgcaaatggagagaatccgctgttttgtaattcggctcacatagttatctgtgatcaccgtctgcttggtcacttgaatgcgcttaaagtaatctctaaatgacaggttgattttttcctttaacggtgtggtgcttactgatacatttccttttttgtctaggagatacagacctgaaaaacgaggttcttgtttatagattttctctaggatgttttgtacttttttcgtctcaagaggctggtcaaatcccatggcaagtgaagttaatctcgcttctgtttcactaattaaataattcatttggtttttgtgaatatttaacataagtgtagcagtttgtttgttttttaagtcgattttttccgtttctttttcgtagataaaataactaatgattagggttggaatcatgaccaaaataaggtacagcctgatcttcttccaaaaccctttcagtatactcatcattcatcgctccaacgtattacctaatagacttattatagcattgaacctatctttattacgatgacttgtgtgatttttaaaaaattaggtgattcgttctggtctcattttcatgctaaagatggatcaagatgttgacattttacttattgtttattaatgtcacattagtgggttgcatttcataaaggatgataaaaaaatggaaaatcataatgttgagaaatctttgaaattatttattgtattatcacgtgcctatcgctcaattaatcatcacatgaacaaacatattgtgaagcacgggctgaatccgactgaatttgcagtattagaattactgtatcataaaggggatcagcctcttcagcaaatcggtgataagattttacttgcaagcggcagcatcacgtatgtggtcgataaattggagaagaaagaactcctcagtcgtagggcctgtgcagaagaccgcagggtgacatttgcgcatattaccaagcagggacgagctttgcttgatgatatcttcccagatcatgcgaaagaaattcatgagatgattagtgtccttagcgaagaagagaaggatgcctgcattgatatgctcaaacatgtgggactgcgtgcaaagcatttatatgatcatacagaataaatagaaaaggaagccctcggcttccttttttatttcgcttttttctcaatcggtaaaatgagtacttctacgcgtcggtttttacttctgccttctgctgtatcgtttgaagcaaccggcttgaattcaccgaaaccttttgtactaaagttctcttggtctaaattgctgttctcaagaagaatactcaaaaagtttacagcacgaatggcacttaaataccagttggattcaaattctgaatttctgatcggtacattatcagtatgtccgctaatgacgatgtcacgagcggggtttatgacaagtagttttgagatttcctttgctaacgggacatcttgagggcgaataaccgcccggccagaatcaaagaagatactgtcttctatcgtaatgagcaaaccttcgtccgtgagctttgtttcgagcttagctccaagtttcttattggcaatgaaggagtccacttgctttttgacctttgtgagaacggcatggtctcgagctttcgctttggcttcttcatcttcttcggctgctttcttggtctggttgctattttcagtttcttcagtgctttgcatgctggtttgatccatgacaccagtaccacccgtaaagacgacattaaaagactttgccatctgttcgtattttgccgcatcaatcgaactagatgcaaatagcacaatgaagagagcgagtagaagcgtcagaagatcggcataagggatcagccaagattcatctacatggtcatcgtgatcatgttttttacgtttcctagccattttgtttttctccttcttcaatgacaagatttgcacgttctttcgctggtaagtacatgagaagtttttgttcaatcacttttggagattgaccttcaagaacagaaaggatcccttcgatcataatcagacgaagctttacttcttcctttgatttacgcttcagcttgttggcaaatggatgccataacacatacccggtaaaaatcccaagcagtgtggcaacgaaggctgcactgattgcatgtccaagtgcttcaatatctcccatgtttgcaagtgcggcaataagtccgacaacggcgccaagtacaccaagcgtcggagcgtatgtacctgcttgtgtaaagattaatgcgcctgactgatgtctttcagacatggcgtcaacctcttctgttaagacgtcgcgaataaattctgcactctgaccgtcaaccgccatgcttaagccgttcttaaggaaatcgtcatctacttcctcaatgctagcttctaatgccaaaagaccttcacgacgcgcaatttgtgcccagtttgaaaaaagagggatcatttcttgaatcgttggaagctggttgtctttgaaaattttgccgaacaattttggtgttttcttaatttcactagatgggaatgcgatgacaacagctgcaatcgtcccaacaacaatgatcaatatagccgctgggttgataagagcggttagactcacacctttcaaaaccataccgacactcagtgcaataaatgctaaaataataccaattaacgatgttttgtccattatctcaccaaatcctttaactatctttttctatagttaatatcggtgtcttctagaagggttttagtcagaatataaaattaaggcagtttctgtgaagaaattttgacgaaagcgctttctaataccttaaaaaagaagctccctctgatataaagggagtttctttttaatttctttgagcagtttcatttaaaagcagctcttttaatttttcttcatacataattttgacaagatcatagctccaattcatcatgtgatccacctctttttcttttatcgtaaaggaaaagaggcggagggggcgtcggcgtgcggatggaacttagacaccgcaacatgatggagctgtagatccttcttaggatgtacttatcctttttttactacaatttcgttatcttcaacatctacagtaaatcctgaaagcttttcttcttcaagcaatatttccgtcatttgatcttcaacatgctcttgaatggttcttcgcagtggacgagcaccaaatgcagggtgatatccaagttctgcaattttttctttcgcttcttttgtcacatggactgttaaatgttgctcttttaattgcactgacagctcattgagcagaagatccacaatcttcactaaatcatctctatctaatgagtcaaactgaatgatgctgtcaaaacggttcaagaattctggcttgaaataggcgctgagtgaatcaatgagtgattgttcctcaatcgcttcttcctgatcagactggaagccgactttgaccgttttatctgtgctgcctgcgttacttgtcatgatgatgactgtatctttaaagctgacggttctgccttggctgtctgttaaccggccatcttccatgatttgaaggaacatatgctgcacatcaggatgtgctttttcgatttcatccagcaaaatgatgctgtatggttttctgcgcactttttccgtcagctgacccgcttcatcatgtccaacataaccaggaggagaaccaatgagcttggatactgagtgtttctccatgtactcactcatatctaaacggatgatcgcatctcttgaaccgaataattcttcagctagcgtttttgacaattcggttttcccgacacctgttggtccaacgaataggaaggagcctgttggtctatgtttcgattttaagccggctctgcttcttttcacagctttcgccactttttcaaccgcatgttcctgaccaatcacccgtgcttttaagcggacgtcaatttctttcattttggtttgttcgtctgcttgcagtttgccgacagggatgcctgttttttgttccacaatggcttgaatggcttctgctgtgacgacatgttctttgtcatttgttttgttttgaagtcttgcttcaatggcttcttcttcatctcgaagcttcgctgctttttcgtattgttcttcttttaaagcagcttgtttttcagcagcaatttctctcagacgattcgttagttcatcttcacttgctgcatcaatggagaggttcgcttttgaacctgcttcatccattaaatcaatggctttatccggcaaatgacggtcttgaatataccgggaagataattgaacacacgcttgaatagcttcgtctgaataagtgacgccatgataactttcgtacttatcttgaatgccttttaaaatctcgatcgcttcatcttgtgttggctcatccacaatgacgggctggaagcgtcgttcaagtgcggcatctttttcaatttgacgatattcttttaatgtcgtcgcacctactagctgaagctcgcctcgtgcaagggctggttttaagatgtttccagcatccattgacccttcggcagatcctgcgcctacaagaagatggatttcatctacaaataagataatatttttacggctttgcaattctttgattaactgcttcattctttcctcaaattgaccacgtatccccgtattcgctacaagggaggagacatctaataaatagatttgtttgttctttaatttatttggtacatcgccacttgcaattttcagtgcgagtccttcagcgatcgctgttttcccaacacctggttcaccaatcagaacagggttatttttatttcttctatttaaaatttcaatgactcttgcgacttcttcatcacggccgatgactggatcaattaaaccagcatttgcgccatctgttaaattccggccaagttcatcgagtaagcctttttgctttggctgctctacgctttgtgcatgtcctgcttgctcagagaagaatgagcttcccccgaacaattgaggtcccattttcatttttgattgctccatcaaagaggtgtagcagtcttcacataaaaccatttggctccgggacgaatttacttgcatattcaggcgaatagttgcttcatttacttgacaatgttgacaacgcatttgccataacctccttaaaataaagtttgactttatttgaccaatgaatgttaaagaaaatggtctgttgtttgaccatctttgactatagtatactctgacctattttgactttcaactgttttgctcaaaggcagttgaaaatccttttttgcatttaatcatggtttgtccttcttttcaaggaactcgtctcataggataaaaaaagacaatcgaaagtgatgggtgcggaggggtcacatgaaacgttcaaatgaatccgcttttcagcttgcctttttatatgtaggaacagtggttggagctgggtttgcgacaggaaaagaaatcgtagaattttttgttcgttttggctggattggactattcggaatcttgattagcggcgctatttttactggacttggtgcaaaaatgatgctcatttctaaacgaattgaagcagagtcttatcaagatatgaaccggtttctatttggcacagctgcaagcaggtatattaatgtcgtcatgttttttattttactaggcgtcacttcagtgatgatttctggcgcaggggctatttttgaagagcagcttggcatatcaaaggaatatggaatctttttgacgatcattctgagcgtcattgtgcttttgaaaggttcaaaaggattatttggtgtcaatgttctcgtcgtcccaatgcttattttcttttcattgatcgtatttcttgattcattcgtttttagcagtagtgaaagttatgttcttgcgcttcaaatgggtgagggagagtggattttatcagctatctcatatggagcttttaatttagcactttctcaagcagtgttagtgcccgtcgcaaatgaaatgacctctgaagcggtgattaaaaagggagctgtgcttgggggcgtcatgctgacccttattttactggcatgctttttatctctttcttcattaaatatgctggaggcgtttgatattccaatggctcaggtagtgtatcaagtagcaaactccattcacctcatttatttatttgtgatcttcggcgaagtctttacatccgtcataggcaatttatatggactcgagagacaagtgagggcgtatattcggatgaacagtgtcttgacaatatcccttattctcttatgctgctatgtgattagtaaaatcggttacggtacattgatatcaacggtttatcctatttttggctatgtgagcatcttttttatcctctttctttgtctaaaaaaagtgcctgcatctcttgataagtaaagaagggatagcctgcatgaaaaatatgtggtacactatcctctgtgaaaattgaacaaaaatccgtgtaaaacgggagaggttctagcaaaaccctctataaaaaactaaggacttgccgtatccttggatgtggcattttttattttttatggctgggacacctcatacacttgtaaaggtgtcttttcttttgagaaaataggggttttcaagagcctttcagatgcagctttgtacgattgtatagatctgcaaaaggaggagaacagaaaatgaaaaatgaaaaagcagtcgttgtctttagcgggggacaagacagtacgacatgtttattatgggcacttcaacaattcgaagaggtagaaaccgtgacctttcattataatcagcgtcatcaagaagaaattgatgtcgccaaaagaattgctgacaagttaggtgtgaagaatcatctattagatatgtctcttttgaatcagctggcaccaaatgctttaacaagagatgacattgacattgaggaaaaagaaggagagctgccttccacatttgtaccaggacgaaacttagtgttcttatccttcgcttctattcttgcgtatcaaatcggagcaagacatattatcaccggtgtatgtgaaacagactttagcggctatccagattgccgtgacgagtttgtaaagtcttgtaatgtcacagtgaatttggcgatggaaaaaccatttgtgatccatacaccactcatgtggctcaataaagcagaaacatggaagcttgcggatgagctgaatgcgctggattttgtaaaaaatgaaacgctcacttgctataatggcatcatttctgatggctgcggggaatgtcctgcgtgtaagcttcggaaaaatggctatgacacttatatggaaatgaaggaggcaaaataagtgctttctcaaatctatccacaaacgaatcatccatactcatttgaattgaacaaagatatgcatgtatcggctgcccatttcatcccaagagaagatgcaggtgcttgtagccgcgtacatggtcatacgtacaccatcaatataaccattgcgggagacgagctagatgaatcgggtttccttgtcaatttcagtacattgaagaagctcattcatggtcagtatgatcacacactgcttaatgatcatgaagagttctcgtcaaccgatccatacgcgatgcctactacagaggttgtggcaaagacagtccatgacaaagtagcagcgtatttatcgactttagcgaacaaaccggtatgtgttcaggtctttgtgagggagactccaacaagctactgcatttaccggccgaaacgagttgaaaacaatggctaaagcgattcctgtattagaaatctttggtccgaccattcaaggagaagggatggtcattggacaaaaaaccatgtttgtcagaacagctggctgtgactactcttgcagctggtgtgattccgcctttacatgggatggctcagcgaagcatgacattcagtggcttcacgcagaagacattgtcaaagaattaaaaagaataggcggacaggctttttctcatgtcaccatttcaggggggaaccctgcgcttttaaaacaaatggaatcacttattgatttgctgcacgaagaaggaattgatacagcgcttgaaacacaagggacgatgtatcaggactggtttttgaaaatcgatgatttaaccatttctccgaagccgccaagctcaaatatgaaaacagattttacgaaactaacacgaatcatagatgagctgaaaagcggaaatagattgcagcatgcaagcctgaaggtcgtgatctttgacgatcatgatctagcctatgcaaaggatgttcatgcgaaatatccagagcttcctttttatctgcaggtaggaaatgatgacacgacaacaggtgatgatgcgtacttattgacgcatttattaaagagatatgaagcgcttgtcgatcaagtagcgcaagatccagacttaaatcgcgtaagagtgctgccgcagctgcacacattattgtggggaaataaacgaggcgtatagaaaggaagagaagacatgacgacaagaaaaccagaagaattagaaggtgtcactttactaggaaatcaagggaccaattatttgtttgattatgcaccacaagtgcttgaaacgtttccgaataaacatacaaatagagattattttgtgaaattcaactgcccagaatttacgtcactttgtccgcaaacaggtcagccggattttgcgacagtctatatcagctatatcccaaatgaaatcatggtcgaaagtaaatcactaaaattatatttgttcagcttccgtaaccatggtgactttcatgaggattgtatgaacattattatgaacgatctcattgaattgatggacccaagatacattgaagtgtggggcaaatttacaccaagaggcggtatttcaattgacccgtatacgaactacggaaaacctggtaccaaatatgaagaaatggcatcatatcgtatgatgaaccatgatatgtatccagaaacgattgataatcgctaatcaataggaaaagacatgcctgatgacatgtctttttttacggggttaaaatgaatcaatcaggctgaacttataaaaaaagagaagagtcatgtcgctcttctcatacaaatgggaatagaacttgctaggacggctgggggctaccagctcgtaaacatattatatatgacagaacgtatgtttgtaaagataaatcgtgttttttgcttatcctatttgctttgagataaaatagggggcaatgaacggaaaacggaggcgtttgagttggcaaacaaagaagaaaagacagagaagctgctgatggagctaagagaagagcttcaaatgctcgaacatcaaaacaaagaacgatataaatggagtgcctccacattgcttggagtgattgcacttttgattgataaaggcgttatcacccccgaggaagttgacatgtacaagacgaaagcggaaatgcaaacctttcatacgcaaaaagactgacaccgcttcatatagtgtcagtctttttcatatgtgattgtcaaagagagctaaactgtcaaacgagagcagctttgcttcgtatatacgtatgtaacgatagtctgaattgaggattgcaaattaatgtacggagtctttgatgattttatagtttttatgattaacgactgttagtgaatccagttctaaatctctatagttgtccataatggtgacatccacaatgacagagttttcattcactttttcaactacacctgttaaaccatttctaaattcgatcacatttccaatttttgcaatcttcaaccgatccctctcctttaaaaacagatttcattccctattaaaaagtattttgcaatattttcataccaatgtaaaggataaagacgtttttgtttcgttttcgttgtatgctttcctaacggatggtatatttaatatttgatgatggctgtaaaggagcggtttttttgactgaagaacaaatcctcacaatccttgaatcgttacgaaatgggacggaaaagcaagtgaccatccaaaaagatgattttttaacgtttcgttcggtcttggtgaatcaagatgattttaagcattttcgcgggattgcgaaacatggtggagatgttatttttgaatatcttacagaagcaagaagctaaagctttttctcatgaatgagagaaagcttttttattttagttcttttgtcacacttcaaacgagcttgatacatctgaaaagaaaatgtaataacccataatcaggtgcataaggatgattataggcggaaacaggacctttttaagcgctaacaatgccagtttataagcgatcaaactaataaattccatttaatgacggaatttggacaggcatgcaaatctttgtgcgtgaaaatagaaggagctcttgttagagtggacaagtatcttaccgcctattttgattaaaggaggaatgaggcgaatgatgaaaattcatacagctctttttgtcatccttatgctggtcgcagccatgaagatggacaacctacaagagcagcaaggcacattaagtcacgaactttcacaagcacctgttaagcatgagctttcatatatagatcaagatgatcacgatcaagtcatcccagcattttcagaggagaagcgtcagccgaaagtcaaaatgcttagtacgtctacagaagaaaagtcttcaaaaacgaagcaaaagaaaagagtaaaatcagaaacgacgaatgaggaaagcgccaaacgctattctaatgaagaaatggagctactctcacgattggtacacgctgaagcgaaaggtgaatcttacgcaggtaaaaaagctgtggcaagcgtcgtcttaaacagggtggagcatcgctcgtttcctgacagtgtcaaaggtgttatttatcagcgaaatgctttccagccagtatcgaatggaagtattcatgataaagcagatcaagattctgttaaagctgtgaaacaggtagtgaaagaacatgacagaacaacaaaggccatctatttttataatcccaaaacggcaacagataactggattcgttcccgcaaaattgtagaacgtatcggtcgtcacgtatttgccgtataaagaaaagaagcgatcaatcagatcgctcttttttttgtcttcaattatcaaaatattttcaggacttgtctcatagaatgtgaaaagaatttgcttttagacaaaggggaggctacatgaatcgatttgtaaaaggggtcattctgctatctgtcgcagctttcattgcggagtgtatagagtttttagtcaatatgattttagcgagagagcttggagaacatggaatgggtctatatatgagtatccttccaatcatcatgcttgtccttgtgatcgccagcttagagctgccagtctccatttctaaattcattgcagaatcgcatgagcggctccacaaaagtatgctccgccatgcgtttaaaatgacgcttgtggtgacatgtacaacaacggggatcgcagcgattgtactgccgttcattcctgtatttcagtcatatcatccgctcatgaaagggctggtgctgtctcttattccgattattgcgtttacctctatcgcacgcggctattttatgggaaagcagcaaatgggcaggatcgctctcgccaatatgctgaagaaaacgatccagcttatctgcttgtttttgttttttcattggtattcgtttgatattgaaacagcggtactcattgccatcggtgtcattgtcgcgagtgatctcgtcgtctttatttatttatactcccaatacgtcatggcgaaaaatgctgtcaatgtcaggtctgttgaattaagagggattgacgtgagaaagcgcctcttagccgtctccattccgacaacgggcatgcggatttttcatgcgatcgccaatgcggttgaaccgtttttaatcaaaggagcgcttattgcagcaggcatctctggcacacttgctgttgatcattacggcatgctggctggtgtcgcgatgtcgattggttttttcccagcgtttatcgcccattccatcatgattgtgatgattcccaatgtatctgaagcctatgcattaggtcagtatgatcttgtgaaaaaacgtgtcaggcaggcaatactcattacgtttgggtacggggtgccggcagtgatggtgatgtattattttgcttatccgctcacacatctcttttttgattcaccgcaagctgctgtctatttacagctgctttggccgtactttttatgccatctgtttgtgatgccatttcaagcgtgtttaatcggtatggggctcattaaagatgtgttcctacataatatatgggtgcatgtcgtctcgttttctatggtctattttcttggttcaattgaaagcttaaatatgatgggggttatattagggatgaatacggggatgctgctgctgactgcactgcattatgcgacaatatgtaaggagctcggcgtttccatgtttcttagaatgaaaaaagcttgaatgtcattgtgatcgagagggcaagctataagaaaactgggaaggaagatcctgatgaatcgtaaatgtctacccgccaggcttctcatgatgaccctgcttctattactcataggcaacgatgctgaagcaaaagaatccgttatggcgccaaggatagaggcttctacattaactggtgatacgcagatgattccgccgaaaggaaaaaagaccatcctgcatttttggacaacatggtgcccgtcctgtaaaatggagctgcccgtatttgaccaaatcgtgaaagaaaatcagagtgatgttgatatcttaaccgtgaatttactaggggctgaacaaagtaaacatgcggttgcacaatttgtgaaagacagaaagtttacattcccggtcattctagatgagcacggagaaatgatgaagaaataccaaatcatcaccattccaaccacctttttgataaatgaaaaaggggaaatagtgaaaaatcatgtaggtccactgacgaaaaaacaaatcaaagagtggacggatttttagaacgaaaccttattgttaagaaccaaggctcattcctttggttcttttttgtgttcaattgcttttcatctgaataaactgtgctcagaagagacggaatggtccacatcaataatgataattattatcaaaaagaaattataataattattaattgaaaattgatcagaacctgttataatgaatgacagacctataaaaagcttgaaatagcagaaaatatagatgaaaaaaggaaacgggcaacgattgatgatgtgaaaaccattatcaattagagaggagaaaacaatcatgaatgagaatacagcactttatcaaacaacaaatcaaaagaaaaaatggtccgttcatcaatgggcacagcacggagaattaatagcagcaggtatctcggggattctcattttgattggatggattctaaaggatgagagcatgtggagtattcctttatttatccttgcgtttatgattggaggttttgcaaaggcgaaggaaggaattgaagaaaccatttcgtctaaaagcttgaatgttgaacttttaatgattttcgcagccataggctcagctatcattggatattgggcagagggcgctatcttaatttttattttctcactaagtggtgcgcttgaaacgtatacgtcaaataaaagcaagaaggatttaacagctttaatgagcatcgcaccagatgaagcgactttaattgaagaagatggcacgaccattcaaatcgctgcttcatctttaacaccaggtgaccgtatcatgatcaaagctggggaacgtattgcagcagatggtgtgattttaagcgggagaacaagtgtagatgaatctgcgctcacgggcgagtctgtaccacaagaaaaagggcagggcgaagacgtgtttgcaggaacagtgaacttaaatggttccttaacagtagaagtcaccaaacataatgaagaaacgcttttccataaaattattaaacttgtcgaatcggctcaggaaagtgtgtcaccaagccaggcatttattgaaaaattcgaaggtgcgtatgtaaaaggtgtactgatcaccgtcgcgattttaatggttctgcctcattttgtactaggctggagcttgagtgaaaccttctaccgggccatggtatttatggttgttgcatcaccttgtgcgcttgttgcatccattatgccagctgctttgtcactaatatcaaacggcgcaagaaacggaatgcttgtcaaaggaagcgtctttttagaaaagctaggcacaagcagcatgattgcttttgataaaacggggacgattacaagcggaaagccggctgtagatcaagttgtgatagctaaaggacaagaggaagctgctttttatcaggcgctttatcaaattgaaagtcaatcaaaccacccgttagcgaaagcgatctctgatatggcaaaagagcaccacatagaaagatcagctcatgtcaccattgaagaaacctctggttttggtgtaaaggcacaattgaatggagaaacgtggcggattgggaagaaagactttgccggcaaggcttcaatggaccgcgagatcgaagagaaggaagattatctttctgaaaaaggatacacagtggtgtatgttcaaaaggatcaagaagtcgttggctgccttggccttaaggatcaaattagacctgaagctaaaaaaatgattcaagagctgaatgatttaggcatacaaaccgtcatgctgacaggagatcagcaaaaaacggctgaagccattgcgcaggaagccggcatccaaacggttgtcgctgagtgccttccagatgaaaaggtacatgaggtcaatcaacttaaaaaacaaggtaattccatcatcatggtaggagacggaatcaatgatgcaccggcactcgccacagcagatgtgggggttgcgatgggcggaggcacagacgtggccttagaaacagcagatctgatcttaatgaagaacaatttaaataacttaacaaagatgatccgtctttcaagaaagatgaatcgaatcattaagcaaaatatcattttctcattaacggtgatttgtttgttaatttgtgcgaatttcttacaagtgcttgatttgccttttggcgtcatcgggcatgaaggaagtacgattttggtcattttaaatggactgcgtcttcttcgggcatcttaagcgaatcatcatagcgcacttggcttctgccagtgcgcttttgtgcgaaatatagcaaaaactgatacaatagatcagtagaaaaacgtgtgaggaggatcacgatgaaccgaatgaagagcttgtcttcttggctaaaggaaaaagacattcaaggtgcatttatacatacaaaggaaaatgtgttttatctatctggatacttcacagagccgcatgaaagagtaatggggctgtttgtgtttcaagaggcagatccattttttgttttgcctaaaatggaagtcgagcaggcgaaaaatgctggatggtcaggcgatatcattggttatgaagaccatgagaatccatttgatttcattcagtcagcggtagaaaaacgcggtgtaagagcaactcaacttgcaattgaaaaagagtcgattccgcttcaaagagcagagcagcttcaagctgccactggggcagaaacttttgtccgggcagaagaagagctcaatcagctaagactgattaaagatgaatctgaaattgctacactgaaaaaagccgctcaattggcagatgaaggtgtgaaaattggggtggacgccttaaaagaaggaatcaccgaaacagaagtgctcgctgtcattgaatatgagctaaagaaaaaaaacattcaaggcatgtccttttcgacgatggttctctttggcgaaaaatcaggagagcctcacggaaatccagggcagacagccttaaaaaaaggcgattttgtgttatttgaccttggtgtcattgttgatggctattgctcagacattacaagaacattcatctatcaggaagcttctgacaagcaaaaggacatctatcaaaccgtcctgaacgcagaaatggcggcacttgaaatgagtaagccgggcgtgagaattggagacctggacttaaaagcacgcgggctgatcacagaagctggatatggggcctatttccctcaccgccttgggcatggtctaggggtgtctgttcatgagtttccttctatgagccaggcaaatgatgatcttctccaagaaggcatggtgtatacgatcgaaccggggatctacgtcccaggagtcggcggcgtcagaattgaagatgatgtactgatcacagcagatggtccagtcactttaaccaattatccgaaagagctgacgatcatcaagtaataaaaaaatcacgatgaacgtccatgtcttggaagtgtcatcgtgattttttgtcactcttttcgatccttatcaacaaaaaaatcatcaattgattcaaacggtttgattttatgttcttttcctaaaggatgtagtgcaaaacgagcagaaaacaaaacagtcatacataatataatccatatgatgatacccatcttgaattcccctttccatccagtgatttgttcagctcacatacatcttaaagtatgaaacgcttaccatatcaagagaaagtaggagaaaaaatgccaaacataagggagattgcgaaaagagcgggcgtatctgtgacaactgtatcacgtgtgttgaatgatcatccttatgtcaaagaagaaaaacgagaacgagtgctacatgcgatgaaagagctcaaatatacgagaaacattcaggctgtacatttagcaaagggctattcaaatatgcttggcattgttcttccaacgattgatcattcttatttcagcagacttgtcacagggattgccgagaaagcacaggcgcgcggtatgcattttgctttatttcaaacagggtatgatcctttaaaagaaaaagaagcattgatgagtttaaaagagcgccgcgtggatgggttaatcttttgctcaaatgcgttaagtgatcgagacattttaaggtggcaggaatccgggcctattattttttgccatccggcgccttttgaagactgctcaacggtgtcgattgcacatgatcaagcatttaaagaagggctgcatcatttagcagcatgcggacatcagcgaatcgcgattgttctagccagaatagaaggcgcaaacagccagtcacgacttcaagcttatcaagatatgatgaaatcgctcgggcaggagattgatgaagaatggatcatcgaagggaagctcacactttttgatggaaaacaattattcacagagtggcaggagatgaagaatcgccccacagcattattcatcacaaatgacgacgtatcagcaggctttttattagaggcgcagcgtcatgatataaaagtaggagaatctccagccatactcggctttcaaaatgatcaattgagtgaggctttggggatttccagcattgatattccgcttaaacgtatgggtcaggaagcgtttgacttgttcgaccgggccgtaaagggagagacaccagaaaaaagaatgctgccatttcgcctgatcgagcgatcaaccaccgttttcaaaaacaatcgttgacgcacgtttcatctgttttgtacgataagagggattgaataagaaggaggtggggatgttcatggaatccttcaccgttgataaagcgttaaataataatgtcatcatcgcaagacacccttcttggggcgaagtggttctaattgggaaaggaatcggcttcgggaaaaaatcgggtgatgttctcgatcaagacacatttgaaaaaatgtttgtacttaaaaatacaaaagaacaaacagaatataaacagctgcttcaccacattgatgagaacatgatcgagcttgccaatgacgtcatttatcatatacgagaaaaaatggggcaccgtttgaatgagcatattcatattgccctgactgaccatattgcctttagttttaagcgggtgcagcaaggatatgatatcaccaatccctttatgcttgagactaaatcgctgtatccgaaagaatacgaggtcgcaaaggaagtcgttgagctgattaacgagcgttcagatgtcgaaacaaagctgccagaaggagagattggttttattgcgctccatattcactcagctttgacgaatcggcccttatctgaggtgaaccgtcattcgcagcttattacgcagatggtccaagtcatagaagattcatttcatatgaaagtagaccgtgaaagtattcattatttacgcttattgcgccatattacattttcgattgagcgcattaaacgggaagaatcattagaggagccagaaaaattgcttcatctattgaaaaatgaatatcctttatgctacaatactgcttggaaaatgatcaaaatattacaacatgcattgaaaaagcctgtacaggatgcggaggctgtctacctgacacttcatctgtacagattgacaaataaaatttcatagtttccttgaaacgtgtaactgattcgatcaggcatgagtgacttaaggtaaatacaggataagatcctgttatttgcgcaaccttatatcaccatgcctttttttgtgtttgaaggtgaaatgtaaacggttaattatgaaatgtacgtcagggagcgtcccacatgtatgttgtaagcgaaaacaaaaggaggttcaaccagtgtttaaatcactttttggtgtgttgcaaaaaattggacgagcacttatgcttccagttgcgatccttcctgctgctggtattttactagcacttgggaatgcgatgcaaaatccgcagctgattgatgtagctcaatttttaagcaatgatacaattcagcttgttgcaagtgtcatggaaaatgcggggaacattgtcttctcgaatcttccgctcttatttgctgtaggggttgccatcggtcttgctaatggagacggtgtggcagggattgccgcaattatcggttatcttgtcatgaacgtgacaatgagcgccgtattaatggccaatggatcgattccatccgattccatcaaattggctaagttctttaaggaaagccatccagcgtatattaatatgctcggcattccgaccttgtctaccggcgtcttcggcgggattattgtcggggtattagcagcttatatgtataataaattttacaaaattgagctcccgcaatatctcggcttctttgctggtaaacgttttgttccaatcgttacatctatttctgcacttattttagggcttttgatgctagtcatttggccgccaattcaaggtgcactgaactcgttttcaacaggactgctcgcagcgaatgagccgcttgctgcctttgtattcggtgtgattgaacgctcattaattccgtttggtctgcaccacattttctactcgccattctggtatgagttctttagttataagagcttatcaggtgagcttgtccgtggtgatcagcgtatcttcatggcacagatcaaagatggtgttcagctgacagctggtacattcatgacagggaaatatccgttcatgatgtttggtctgccagcagcagcacttgcgatttaccatgaagcaaaaccaaagaataaaaagcttgtcgctggaattatgggatcagcagccctgacttctttcctaacagggattactgaaccgcttgaattctcattcttgtttgttgcaccagtgttatttgcaatccactgtgtatttgctggattatcctttatgattatggatattctaaacgtgaaaatcggtatgaccttctcagggggattaatcgacttcttcttattcggtatcttgccaaacagaaccgcttggtggcttgtgattccagttggtctcgtacttgctgctatttattacttcggatttagattcgccattcgcaaatttaatctgaaaacgccaggccgcgaggatgaagcagctgacggtgcagatagtgctaagtctgaaaagggtaatgacttaccttatgaaattcttgaagcaatgggtgaccaagaaaacattaaacaccttgatgcttgtattacgcgtttacgtgtcactgtcaatgatcagaagaaagtggacaaggaccgcttgaaaaagcttggtgcttcaggagttctcgaagtaggaaacaacatccaggccatctttggaccacgctctgataatttaaaaacacaaatgcaggacatcattgcaggccgcacgcctcgtccagcgaaagacccttctgcaaaagaagaagtcagccagcaggtcgaagaagtcattgcaaaaccgcttcaaaacgagctaggtgaagaaatttttgcttcaccaattacaggggagcttcatccgattacagatgtaccagatcaagtattttcagggaaaatgatgggtgacggtttcgccatcttgccaacagatggaacggtggtttcaccggtgaaagggaagatcttaaatgtattcccaacgaaacacgcaattggcctgcaatctgacggtggacttgaaattttaatccacttcggtattgatacggtcagccttaaaggagaaggatttgaagcatttgtacaagagggagatcaagtagaaatcggtcaaaaactcttagaggttgatattgataaaattaagtctgaagtaccatctttgatgacaccaattgtatttaccaacttaggtgaaggacaatttattgaccttcaagaatccggtgaaatcaaagctggtcaagaaaacatcatgaaaatttcaaaataattttcataactgccgttcttgttagatgacaagctcggcagtatgatataatattgtggatgtattaattgtataaaaaggagattgataaaaatggctcaacaaacattcaaagtaactgcagattctggaattcacgcacgtcctgcaacagttcttgtacaaactgctagtaaatatgatgctgatatcaacttagaatataatggtaaaacagtgaacctgaaatctattatgggtgtaatgtctctaggaattgcgaaaggtgctacaatcacaatctctgcttctggttctgatgaaaatgatgcacttgctgcgcttaaagacacaatgaaaagtgaaggcctaggcgagtaatgcaacaactgaaaggaatcggtgcttcatcaggcgttgcgattgcaaaagcatatcgtctggaagaaccagatttaacagttcaccaaaaagacatcaatgatccagagacagaagtgaagcgttttgaagaagcaattcatgtttctaaacaagaacttgaagcaattaaagaacatgcgctaaaagagcttggccaagacaaagcagatatcttttctgcacaccttcttgtgttaagtgatccagagctgctaaacccagtaaaggataaaatcaactctgataaagtaaatgctgaatttgctttaaaagaaacagcgacaatgtttgtcaccatgttcgaagcaatggacaatgaatacatgaaggaacgtgcagcggatattcgcgacgtaacaaaacgtgtaactggacatttgctaggcgttgacattccaaatccaagcatgatttctgaagaagtcatcatcatcgctgaagatttaacaccttctgatactgctcagctgaacagacaattcgtcaaaggttttgcgacagatatcggcggtcgtacttctcactcagcgatcatggcaagatctatggagattccagcagttgttggaacaaaagaagcaacaaaaacggtgaaaaacaatgatctgatcattgtcgatggtattagcggagacgtcatcattcagccttctgaagatgaagtgaaagcgtatcaaaaaaagcatgaagactacttagctaaaaaagcggaatgggcgaaactggtggaccagccaacggtcacaaaagacggcgttcacgtagagctagctgcaaatatcggaacacctgaagatgtaaaaggtgtacttgaaaatggcggcgaagcagtcggattgtaccgtacagaatttttatacatgggcagagatcagcttccaacagaagaagaacagttcaatgcttataaaacagtgttagagaagatggaaggtaaagcggttgttgtccgcacacttgatattggtggcgataaagaactcccttacttgcagcttccaaaagaaatgaacccgttccttggctttagagcgatccgcctttgcctcgaagaacaggagattttcagaacacagctacgcgccttacttcgtgcaagtacatatggaaacttgaaaatcatgttccctatgatcgcgacattatcagaatttagagaagcaaaagccattttacttgaagaaaaagaagcattggttgccgctggtacagacgtatccgattccattgaaatcggtataatggtagaaattccatcaaccgctgtcatcgcagaccaattcgcaaaagaagttgatttcttcagtattggaacaaatgatttgattcaatacacaatggctgctgatcgaatgaacgaacgagtgtcttatctttaccagccttacaatccagcgattttacgtttgattacgcttgttattgaagcagcgcataaagaaggtaaatgggttggcatgtgcggtgagatggcaggagatgaaatcgcaatcccacttctacttggattaggattagatgaattctcaatgagtgcaacatctattcttccagcaagaacacagctaagcaagctttctaaggaagaagctgcatcatttaaagagcatattttatcacttagcacaacagaagaagtggttgatttcgtgaagaaaacgtttcaacatcactaagtgaattcaaaccagacagtaaccctgtctggtttttttgtcgaattttatcatattgggtcatatccggcagagagaagggcatcctataagaaaaatggaggtgaccagattgcctttctcagactataaaccgggtgatcaagtatatgtgatttatcgaaatccacatgcagcaaacgtagcacaaatcaaagaagcagaaattgtatcacatccatataacgaagaggagcttgccctatttttacttgaaacgtatcatcctttagctccagatgatgcggtctttccgacatatgaagaagcagaagctctttatcaagatttgtttgaataagggagattttagaaaggataaaagccatcctgcgcggttaaagtaaccgtatgaaaacctataaggtaaggatgtgctaaatatgatcaaaccttttgtgccccagcttgtttacattgaaccaagggcgttagagtacccgttaggacgagagctgaaggaaaagttcgagggtatgggtattgaaataagagaaacgacttcacataaccaagtaagaaatattccgggtaaaaatgacttgcaaaagtatcgtaatgcgaaatcaacgcttgtcattggtgtgaggaaaacgttgaagtttgatacgtctaaaccatctgcagagtatgcgatcccatttgcgacaggatgtatggggcattgccattattgctatctgcaaacgacaatgggaagtaagccgtacattcgaacatatgtgaatgttgaagaaatattagatcaggcggagcagtacatgaacgagcgtgcgcctgaaatcacgagatttgaagcttcttgtacttcagatattgtaggaattgaccatttgacacatacactaaaggcagcgattgaatacttcggccagactgatcttggtaagcttcgctttgtcaccaaatttcatcatgtcgatcatttacttgatgcaaagcataatggccgaacaagattccgctttagtatcaatgcggattatgtcattaaatatttcgaacccggaacatcaccgttagatcagcggattgaagcagctgtcaaggtcgcaaaagcaggctatcctcttggctttattattgccccaatttacattcacgaaggctggcaggaaggatataaagttctttttgaaaagctcgatgcagccctaactgaagatgtcaggcacgatatcacctttgaaatgattcagcatcgttttacaaaaccagcgaagcgtgtgatccaaaaaaactatccgaaatcaaaattagaattggatgaagaaaaaagaagatacaagtggggtagatatggaattgggaaatatatctaccaaaaagatgaggaacaagaactaagacagacgttagaatcatatatcgatcagtactttccgtctgcaaaaattgaatattttacttaaagcaagcctttatggcttgttttttctatttaaattttcttacaactattgaatgcggtaccaattttgccgatatacaaaataagatgcgaaagtaggatgtaggggtgatgagatgtttaagaaacttcaagtgagaatagctgttttcatctcagttattttaattttaaccgtcgtggccgttcaagtgggttccaacatagtattaacaccactcattgaacgggatgcaaaaaccaccacagcggcaacagcagaaagcatgagagatattattgcacaaaagcttgataattacgggggtacaattaacaaactggcaacaagtacactgactgaagattttgcacaaaagcaaacaaaacaaacattagcctttgaaaacgatgaactaaaagtcttgcaggagcaggatgaactcatctcacttgcctatataggaacaagtgacggtaaaatgtttgccttcccagagtctgattttggtgaaggatatgatccaactaagcgagattggtttatcaattcggctgaaaagcctgatgaagtcatctggacagatccgtatattgataaagcaacgaatgaaatggttgtctcagccaccaaggcaattgtgcgaaatggaaaggttgttggagtcgcaggacttgatttgaagctgtcttccattcaatcgtatataaaggaacaaaagattccttatatgggaaacgcttttttagttgatggcaaaggaacgattttggcacatccaactgagcaaggaaaaaacatatcaaaagtcgcttctgtaaaaaaagcgatcgacaattccggtcttgatgataacaaagaactgacggtcatatctaaaatcaaagaggccgattggacaataggtgtcagctttgagaaaaagaaactgctttggatcacagaacaaatgaatcagacaagcatcattatttcagtcattgccattgttcttgcgatcattctcagtttcttattagcaagaagcatcacaacgccaatcaagcgtctgatcgagcatgtgcgtaaggtgtctgaaggtgatttaaccagctcacttgaaacgaaatctcaagatgagattggtttcctcacgaagagctttaatcaaatgaccgaggggatcagagagttaattgaaaaagtaaaaggggcttcagaccaagtagtgacatcaacggatgaagtcacgcaaatttcaaatgaaaccttactgtcgagcgaacagattgcaacggccattcaagaggtggcaacaggtgcgtctaagcaggcttcagaagcagaaacgattaatgagaaatcagagcatttatatgaaaaagtacgtcatatgggtgagcttgccacgcaaatgcaagccaactcaaaatcatctgaagatgcaggctatagagggctagatgcactaggtatgctcgttcaaaaatcaacacaagcgaacgaagaatcgaagaaagtggaacaaatgctgcttgaccttgaacataaaacgaaaaatattgaaaacgttgtgaccgccatctctgaaatctctgatcaaacgaatttacttgcactgaatgcaagcattgaagcagcgagagccggagaaagcggacgaggatttgctgttgttgcagaagaagtcagaaagcttgctgaacaatctgcgcaatcaaccaaacacattagtgaaaccgtcaaactcattcaagatgaatcgaagaaggcggctgaagcgatgacggcagcaagtaagatgaatgaggaacaaggtgacgccattaatgcaacaggcgaggcactgagtagcatcacaatggaaatgcaggcacttgtcggctcaattgacagcattcatacacagatcaatgaaatgacagacgaacagcagaaaatgaatgactccattcaaagcattgctgcgatctcagaagaatctgcggcttcagctgaggaagtgcatgcgtctacagatgaacaagtccaagcgttagaaagaacgaaaacttcgactgaaatgctgaacgaatcaagccaggcattacgtcaggcggttgatcggtttaagctgtaattaagcggaaaggaaccttgcggcgtgagcaaggttctttttgtatgataaaataaagcagaggaggtgttgacatgaatgtcaatttatctgggaaaaaagcattggtcgctgcaagcagtcaaggtatcggaaaagcgattgcctttgctctagcaaaagagggagcggatgtgatgctttcaggaaggcatgagcacacgctgaaagaaacggtgaaagaattatctccgcttgtaaaaggaaagctgacttatcaagtatgtgatgtgtctgacgcgcagcaaatcaaggcgctcgttcaagcggcagctggtgatgagaagtgtctagacattcttgtgaacaatacaggcgggccaaaaacagggacgcttgaaaccttaacagatgaggactggttggaatcatttcagcttcatttactcagctatattcgattattaaaagaggccttgccttatttgaaaaaacacggcgcacgcgtattaaacattgcgtccatgtcagtaaaagaaccgatcccaggcttgatgctgtcaaatacttttagaccagctattgtcggctggacaaaaacagccgctcaggagcttgcaaaggatggaattttgattaatacgttagccccagggaaaattgaaacagaccgcgttaaacagctggacaagcaccgcgcacaggcagagcaccaaacagttgaagaaatcaaagcacaggctgaacgtgcgattccgcttggccgttacggacagccagaggaatttgcagcatatgcagcttttcttttatctgaagcaagtacatatatgacaggtcaaacactcatcattgatggtggattgacaaagtctctttaaggaggaacatggggtgacaatcaaaacagttggttttattggaattggtgtaatgggacgcagtatggcagaacatttaatggatgctggttatgaagttctcgtttatacaagaacaaaagcgaaagcagatgcgctcattcaaaaaggcgcatcatggaagccggcagtgaaggaaattgcagaacatgcagatgctgtcatcacaatggtaggatatccatcagatgtagaagaaatctatttaggtgaagaggggcttgtggcacatgctacgcctggtacttatctgatagatatgacgacatcgaagcctcagctggcaaaagaaattgaagtgaaagcgaaagaaaaaggattgtttgcgttagatgcaccagtttctggcggagacgtaggcgcaaaaaatggaacgcttgcgatcatgattggcggagaaaaatcagcctatgaagcgtgcctgcccttatttgagcaaatgggcgaaaacattcaatatcaaggacctgcaggaagcggtcagcataccaaaatgtgtaaccaaattgcgatcgcagcaggtatggtaggcgttgcagaggctatggcctatgccgaaaaatcaggacttgatccagagcacgtgctcaaaagcatcacaacgggcgcagcaggaagctggtccttgtcaaaccttgcaccaagaatgctgaaaggtgatttcgagccagggttctacgtgaagcattttatcaaggatatgggcattgcacttgaggaagcagaactgatgggagaagaaatgccaggactttcacttgcaaagtcactttatgaaaagctgagcgaacagggcgaagaaaacagcggcacacagagtatatataaattatgggtaaaataaaaagacctgtcccatttagggacaggtcagcgtgtagacaaaccctcgcattcggtgtcagtcctgcgtgccggtgctcacgaatgtcaaattcgctccgctccggtactcgtccttcctagactgcaaaggttttctatcacgctgaaaagaagacaaaaggctaaaatgaagatcattttagccctttgttaacaatctggcctgtcccatttagggacaggttttttagatatcttattttccgatgaattgctgcgtccagtagttaccagatttcacataaccaacaccgatatgtgtatagcttttatttaagatatttgctctgtgaccttcactgttcatccaagcagtcaccacttcttgaggagatctttgaccttgggcaatgttttcacctgctgttttgtaagtgataccgaatttcttcatttgatcaaatggagatccgtaagttgggcttgtatgagagaaatagtttttatctttcatatcttgagattttgcgcgagcagatttgcttagttttgaatcaacagaaagtgcttttaatccttgctttgcacgctctttgtttgtaagctcaacgacttctttttcaaatgcattcaagctgctgtctgcttttgctgtcgttgtgtctttttgatcagcttttgtattgttattgttgtttgaattttgttttgctggcgcacttggtttagaagcagtaggttttttcactgattcttgtttttgttcattttttgctttgtttacttctttcaccacttttgtgccagtaacaggttgaccgcttttgatcagcttgtttaaaagagcttcgatctctttttgattcgacttgcttagcttgtttacatctgaagagatatgtaattttgcagctaatgtatgaagatcaatggtttgatgctgtacatgtattacttgtttcaggttaagctccttcgcatcagctgaatgtcccccagtgaacgtgatgagtgcagcagccgttagcgctgaaaaaaagaatgatttcttcttcatattgtaactcctcctaaaatctttgttttgttttctcacagaaaatcataacatggactttttgttataaacgtaccagcatcctccattgacaatgcctgtttgtcatttttgttaaagtcacaaaaaaacccgcctcatatcaaaggatagggaattcttccatttaatgaaaacgacataaacataccaatattttaaagtgttagtatatttttttgcataatagggattgacagctttttttcacttgtttcgctgtaacaactattacaaaagtgttacaataatgagtggtaattgtaaaagattgaaaggatgagaggagctacataagtgggagagaaacagcatcaaggtggtgccgagcagaaaaaaatcaagcgccggaacgcctggaggattaatctctttttcttcgctgtctttagtttatttgctggacttgtgatcaagcttggtgtgctgcagatcgtcaatggtgaggattataaaaagcaagcaaaccgaacagaggtcaaaacagcatcatacccgtctccgagaggaaaaatgtatgacgcgagaggaagagtcgtcgttgataacgaaagtgtacctgccatcgtttatacatcagaaagcggtgtgaaggcgaaggataagattaaagtagcaagaaaacttgcaacttatataaaaatggatactgattttttgagagagcgtgacattcgagatttttggctggcaagccatccgaaagaagcggataagctcatttcaaaagcagagcaaaagaatcttaaagcaaaagatgtctatccacttcaagtagagcgcgtgcctaaggaagaggtcaaggcgatcgaaaaaaatgcagaggaaaaagcagttgcagcgatctatcgtcgatttacaggcggatatgcctttgagcctcaaatcgtgaaagcaatggaccccaatgaagagaaaaaaggggacgaaaaagtggctttactcgatgaaacaaaagagtcaaagcagacatcatctgtgagtttgacctatgaagagatttcacttgtgtcagagcatctggatgaactgcctggtgtaaatgtcatcaatgattggacaagaaaatacccgtatgaaaagacgctttataatgtacttggcggtgtgaccacaccagagcaaggcattataaaagagcgtgaagattactatatggcaagaggctactcacgaaatgaccgggtagggaagagctatttagagtatcaatacgaggattttctgaacccggagaaagcgaccgttcaatatactcaggttggcgggaagctgctcgatgaaatcaagcggacagagggacgaagaggacttgatcttgcactgacatttgatatggagctgcaaaaggaagtcgacaagatcgtcgaatcagagcttagatccgctagtgcgagaaactatatgatggaccgtgcatttgttgtgatgatggaccctaacactggggatgttcttgcgatgtctggcaagaaaatggacggcagagacgtcactgattatgccatcggaacatttacgacccagtacgaaatgggctctgttgtcaaaggagctactgtcctctctggttatcaagacggaatgtcacacaaccaagcctatatggatataccactctactttgcagggagtgggggaaaaccgaagaggtcttacaaagttcttggatgggtcaatgaccttcaggctctccaaaaaagttccaacgtctacatgttccaagtagcgatgagaatggcgggcatcacctatcaaaaggatgggccgttaccggcaagacctgagcacttacaaaaaatgagaaactactatgcgcaattcggtcttggcgtgaaaacagggatcgatttgccgcaggaatcaagcgggatgcagacacatcctaagacggtcggcggacttttgctcgatgaagcaattggccagtatgacacgtatacaccgcttcaagttgcccagtacatgtcgacgatcgccaatggaggaaatcgcgttcagccaagagtggtgaaaagcgttcaccttccaacgaagaagaatgaagtaggcccagtcgtgaaaaaatatgagccgaaagtgctgaacacgattaacaattcaaaagcagatattgaccgcgtcaaaatggggctgaaaatggtcacatcaacaggtggaactgccgctggccgttttggtcagcatgatgtcgcaggaaaaacagggacggcccaaaccttttactatggtgctaaccgcagctggtggggaaatgccacgtacaatttaacctttgggggatattatccatcgtccaatccgaaggtggcttttagtgtcgtgacaccttatgtctcagataaagattccgtcattaaaaccatcccaagtaaaattattgataagtacgttgaattacaaaagaaatacgaaaagcagtaaacagcagagagcacagcaagagaatgtgctcttttttgctgaaaatatggacgtttccctcgatgacggaaggaaaatacgggttttctagcgaatcttttttatacatcaatctaaggacaaccctaaaaaatgaaaaggagggtcggacgacgatggaacaaaaaatgaaagattcgaatcagctttattcgaatattgatttacatgccgttctttcttctaatggccgctttctctacatttcttctaactgtaagcagcttttgctctatgaacaaaaggatttactagggtgttttttgaaagactttgttcataccgaagatcaatttctcgtcgagagttatttctacaatcagcacatgctagagatttcccactttaggctgcttagaagtgacctaacagctgtatggattgaagctagtattgattttgttgcttgtgatgagttagacagtgaattaagtagagaaatgatcctaaaaatgagggtgctggacgctgaaccgcaaaaagcagcatttcaaacaacatcagaagtgtcagaacagtcgttaggcagtctgccggctttccaacatgtcagtgaagctgaacaattgattgccatgctgccaaatccgttatgtattacgattttaggggaaattgtttatgcgaatgatgcgatgcttcaattaatgggggtaagtacaagagatgacatgatcggcaaaactgcatttgactttattggtgaggagtaccatgacattgtgagaagccgaattacgaggctgcagcaaggccttccagtcggaatgattgaacagatatggaagcggaaagatgggagcagcattcatatcgaagtgaagtcatcacctacgatctatcaaaatcagcgggcagagcttttgctgttagtggacatttcatcccgtaagaaattccaaaccgttcttcaaaaaagccgggagcggtatcagctgctcatccaaaactccattgatacgattgcggtcattcatgatcataaatgggtgtttatgaatgaatcaggcattaaattatttgaagccgaacattacgataaattaataggaaaggatattttccaccagatacattcctgtgaccagcaaaaagtgaaaaagagcttgtcgcgtattattgaaagagcatcagattccgagattgtcacgatgagctgtcatacatttaaacacaagctgatttatactgaaatggtgtgtatcccaaccacattctttggggaaacagccgttcaaattattttaagagatatatcggaacgtaagcagacagaagagctcatgctccgatctgaaaaattatcgatcgcaggtcaattggcagctggcattgcacatgaaatcaggaacccattgaccgctatcaaaggctttttgcagctcattaaaccgaaaacaaaagatcgcgatcaatatttcgagattgttttctctgagctgagccggatagagattatattaagcgagttgctcatgctggcaaaaccgcagcaaacggcatcgatgcagacacttgatttgaaaaaaatcatcagcgaagtcacggctctattagaaacacaagcgaacttaaatggtattttaatgaatacaagtgagatagaagaggatctcctgatgaacggggatcaaaatcagctcaagcaggtgtttatcaatttaatcaaaaatgccgtcgaatccatgccggacggaggtaaggttgacattacggccaaagcagaaagagatgggattctcgtcaccattcgtgatgaaggggtcggcattcctgaatcggtcatgaagcgaataggagagccttttttaacgacaaaggaaaaaggcactggacttggcctcatggtgacatttaatattttagaaaatcacaacgggacgatccgtgtggatagtcatcccgaaaagggcaccgtatttcacatcatgtttcctgcaaaataaaaacaacggcaagagagccgttgtttcagtctgttaaatgaatggaacgtttttcaaggacgaattgttctaggcggtcaagtccttctttcagtgtttcaagtgaataagcataggacagacgcacatacccttcgccgagtggagagaaagcagaccctggtacaacagcaagtcttgtactttctaacagctccatacaaaaatcaaaggaactcatcccaaacgattcaatggatggaaaaatataaaaagcgccagaaggcttaatgaccggaagccccatagaaatgagccgatcatatacataatcgagtcttttcttatattgctctctcatgatgagtgcatcatccacaccatttgtcacagcttcaagtgccgccttttgtgagacagccgaggcacaagacacgttatattgatgtacttttaatacatgtttagcaattggagctgaagcaaataaaaagccaattctccaaccggtcatgctatgagatttagacagtccgttaatcacaatggtctgttcctttaagaaagaggcaattgaatgatgcggccggtcaaatgtcagctcgctatagatttcatcggataaaataaagaggtcttttccttcaaggagctgggcaatctctttcaattcttcttccgaaagcgtgacaccagttgggttcgaaggataaggaagcacaacacactttgtcttttccgttaatgcatcctcaatcagcttggcatttaatttaaagccagcattcgttgtgtcgatatgtacaggcttcccgccacacattcgaatgatcggttcatagccagggtagacaggtccaggtaaaatgacctcgtcaccctctgacaaaatggttcgaaacgcagcatcaatcgcttgacttgcacctgtcgtcacaatgatttctgactctgcatcataatcaagattgactttcttcttgatgtagtgctggatcgcttgtcttagctctaggaaaccagcattatgagtgtacgaggtgaaattctcgtcaatggctgctttggcagctgttttgacatgatgcggcgtataaaaatcgggctggcctatcgtcaaagaaacgacatcctcatatgacgatacgagatttgaaaatgttcgaatgcctgaaatttcaatatcctttactcttggattcagcaaatgctccatttctcatcaccttaaaaatttatgtttttatcctattttaccattcactgcataaatgtcacccgcgaaaggcactggatatcattatctgtagtctattctcctattcatcacagcatgagtgatatattgaagaaagagcaacatttattatagcgtaacctcacgagaaaatacaggctgcggtgaacaggattagaaaacgtcacaactgtgtaaactgaaagaacgtgagaatcaggtcatgggaattgctttcatagacatacgatctcctaaaggaggacgatagatggaacaatcagcgaagacatcgaaaatcgcgtttctatccgtgatgagtaacacatttgttgtcatcttaaaaatcattgtggggctgctcactggatctgttgcggttttatcagaagccattcattcttttctcgatttaatggcatcttttattgcatttatctctgttcgtatttcaagaaagccagcagattctaaacatccttatggtcatggaaaagtcgaaaatatttcaggaacgattgagaccttgctgattttcgttgctggcatttggatcatatacgaatgtgttcacaaattaatgcacccagagccagtcaagctgcctgtgcttggcattgtggtgatgctgataggcgcgctcatcaattttatcgtatcgaaggttgtgaacaaagaggcggagcgagtgcattctgttgccatgaaatcgaatgcattgcacctgttaacagatgtgtatacgtcactaggggtcgcattcagtttattgcttgtagcattaaccgattggtatttcttagatccgatcattggaatgatactcgctctctttattatgcgtgaagcatttaaactcatgaaagaagccttcccgccgcttgtagacgcccggctaacacccgaggaagaaaaatcgatagaagcaatcattcaaggattcagtcaagagttcatcgaatatcatgactttcgaacaagacgatccggtgcagaggaatatattgatttccatttaattgtagatggtaagacaacgattgaagatgttcaccaattatgtgatcgaattgaagagaagattcagcaagaatttccgcatgcacaaatctttattcatgtagaacctgaaagtgaaagaacttcacaaacgtaaaaaaggcgatcaaccaacttaggttgtatcgcctttttttacgcttcatctatgaaatgaaatcaatatccataagcagtatcgtaatcttcataccaagagatataagctgcgtcatcatttgacaaatcatgcttcatgtccaaaaaatcagcttcgcaaatatcttcaatcacagtcatttcgttgttctttaatagtacgacagttcccatcatgaacacctttctttaaaaaatccttgactattgtaccatgtgaagagcggttgtcaacagcagaatggaaacaagacgaaaatatcacaaaatgttaaaaaatcaggaggtaaaagaactagaagtgccatgattttcacaaattttcagtatttattcacataaaacattaagaacaaactgatctaaaatatatgtaaaagtgtacagctccattgatcttactatattcataagatataataacgaatgattataagaaatttatagaaaacatacataataaaggagaaataggatggaaacaaacataacagaaccacacattcaagaaaagaagcatcctgagctagcaggcgtgggctaccgctttcttgcccaccttttggacggcgtcattatcagtgttccttatgccttcattatgtttattttgttcacactcttttttgtctcaagcccagaggcagcatttatgctagaggatgacagctattactattccacaaccgtcatgacggatgaagaatgggctgtcattatgggacttatctttttctacgtagcatcgatcttaatcggtatcgtgttgacatggctttattacgctattatggaagcatcaaaactgcaaggaactcttggtaagatggctcttgggatcaaagtgacaaaagtaacaggcgaaaaagtaacattcggacgagcaactggccgcttttttgcaaaagtctttttgtctccaatcttatgtattgggtacatcattgcctttttcacagagaaaaaacaagcgcttcacgatttaattgcaagtacgattgttgtgaagaaataaagaaaaaaagcacctctgctcaatagtaaggggtgctttttgtatagattgcttgtatggaagagtgaagcataacataaaatagaatgatagtgaaaaatcaggcagggaagggagacaaacgattgagaacaggaaaaaagaccatgcagaaaaaaggggcaggcttcgggttgtttttgacagcacccgttttggcctgggcattgtatgactttgcaaatacgatattttcatccaatatgatcaccattttcttcccgttctacttgcaggaaacgattggagaaagtgcgagaatggatcagatcgccagtacgtttatttcttatgcaaacgcactagccagcatttttctcgtcatttttacaccattatacggggttctgatcgatcgtacaggaaaaaagaagcgctacatcacagtgtttactttaatatgtataacttgtacgtttttgatggggatctttgctggaattgatttctcaagcgaatggtttgggctgcctgtctccttattagtagtggtcaccttgtttgtgatcgcaaaatttttctatcactcgagcctagtgttttatgacaccattctgcccgatcttgggacaaaggatgaaataccgcttatttctgggtttggcattgccgttggttatttagggacgcttgtcggtctctcagtttatttacttgtcggcaatgaccaatttcatgaagcatttattccgacagcgcttttattctttctctttttcctgccctttctcttttttgtaaaagaccctcatccgctgccgcagcaagagaaaaaggcgtcatttttcagcgggtataaagaaattattcgcacgtttaaagagatgaagcaattcaagccggcttttatctttatgattgctttcttttttatgaatgatgccttacagacagcgattgcgatgatggctgtttatgccaaaatcatcattggctttaccgctgggcaatttattctgctttatctggtgtcgaccatttcaagtatcattggctcctttctatttggatatatcacaaaggcgattggggcaaagcgctcgattacagtcgtgtatgtgattttgatcgtggccctgattttggctgtgacagccacaacggaatgggttttctgggtggccggcagtttattcggaatttcactcggcgcaagctggggggcatcacgaatattgataattgagctgacacctaaggaaaagagaggacagttctttggtctctttgcattctcagggaaggtgtcttccattattggacccatcatttatggctcagtcactctgctgtttgcagagcacggaaatctcgcaagccgccttgcactagggtctttactcattcttgcagcgataggacttgtgattcatcaattcgtacgagagaaagcgtaaagaaacgtcaactttttacctatgctgccgatataaaaagtacaatcttatattgaagaatagagggatttccgtggctttaaacaaacaagaaattttacttgactctggtaccaatgaattggaaattgtgaagtttgaaattggttcaaatcaattcggcattaacgtcatgaaagtaagagaaatcattcagccggttgaggtgacggttgtaccgcactctcatcaagatgtagaagggatgattagtttacgaggcgagattttaccagtcatcaatctattttccttttttaatgtcgagtcagatcagtcagaacaagagaaatatattgtgactgaattcaaccaacggaaatttgtgttccatacaggaacggtatcacaaattcaccgcgtcagctgggaagaaattgaaaagccaactgcactcaatcaagggatggaccgtcatttaacgggcatcattaagcttgatgaaaaaatgattttccttccagattacgagaaaatcatttatgatattgaatccgcttctggagtagaaacgtatcatatgtttgacggtgagaaagacgagagaagaacagggaagaagctttatgtcgttgaagactctccgcttctcatgcgtttattaacaaatgaattaaccgaagcaggctataaaaacattgtgacctttgaagatggcaaacaggcatatgaccacgtcatggaccttgtcagtaaaggaatcagtgtgacagaagaaattgatatgattattacggatattgaaatgccaaaaatggatggtcaccgattaacgaaactgttgaaggaaaatcctttaacgagttccataccgattctcatcttctcttcgttaatcactgaagatttgcgccataaaggggaaacaatcggtgcagatgatcaaattagtaaaccagaaattcatcagctgattgaaaaagtcgatcactttattatctaaacaaaaaaccactcggcatgagtggtttttttgtttaaaaataactttccccgagtcgtttgaagacgggctttgtgtaatgtgatttttgttttgtggcggtaggtttttcttttaaaccgacatacgtttgaagtagttgctttgctcggtttaatgacatattcgctttcggattgcgatatgattgatttaaatttcctaagtgtggcaaaaattcgaagtcttctttggttggtggcaggtgaaaataataatctccaatttcaatcagcacgtcggactgttgttgactatatttgggattgttagagaaatgtaggcccacttttcttcctttaccttcttgcaatagtttttgcagcgcacgttttttcaaaagataaagaaacttggggtttggtgcggttttagcatggcggttaacagtataaatggcttttgcgatgttttctgctgtaggttctatgtctttagtatgagcataatcgtccattttttctctcctttgtctttcgtcttcctgtgcttagtataaattatacgtttttattagtaaattgcaaatagagttattgtaaaagcgataggattcatagccctcttatctacaatagccattcaggagggttctaaaacgtggttgaatataaaaatggcagaatgatcagcaaagacacagcatctattcactatgatttttcttctatctgtttcaggtggaaagaatgcggcgcatttcattttctatatgctaaaggtgttgtatattcattcttttaagcatagttgaagctgctttggtaagcaatttctgtattgaagtccgttttttgaagcaggatgaggctttgttgaactttcacataatgaggaggtaacttctataaacttctttaattgaaggatctgcagcattcagagcggtttagctgaccagcatgagggatatcttgaagtagcatcttttcgataatgttggcaaatccattgctgacggtgtcattggtgggcaaaggagaagagacgttcattgcaagaagggcagaagaattgactgaatgaaatatatatgaagtgaactattagttcatgataactacctatttaaataaatgggtagtttctcaatttggattcatttttacatattgcgtctgaaactttaccatatgcctgacaacatgtcgaacatatggtttaacaacatggtctatttcttatgacttgaataagcgcaatagaagcaaccattaaaatcagtttcattcgtcatttgtttagcttcatcaatggcgctctcgccactcatgtgcagaccaatcaatttacggcttgcagcatcacctaaaaatgcacaatcttctgtatgtacaacatactgtccttgatcatcttttgtatgaataaaataataactttttagcatacccctcacctccaacctgaatatcctactataaaacttccaaagatgtaaagaaattttataaaaatttttgcaattttatacacgttcctgttttttgaaaaaaagaaataaaggctaaataatgaaagggattgatagaatggatgtaagaggtaaaagttaaaaaagaagaatggatcgattgaagggtatgttgactcctctattggttgatgttgcttcaaatagcttcaatcaacagagtaaataacgtcgtagggcgtttcagctatgaaaaaaaggacttccttttaaagaaagccctttttcctgttcaattattgcgctccctggccttttagttctcgctgcacgtctaagtcggcagcttctctgctgaacttcggcagtgtaatgaagtaaaaaaggaaaacgagtaaaataataacgcccattccgtaataaatataagaaacgtttgtaatgagttttggaaatagtaccgcaatcagacctaatgtcatggattgagcaaacatggtaagtggatcaacccatcctgacacacgtcccatcagacgaggatggacgattctcggcagccagccgccaatgacaatgttgaccggtccaatacatgtaccaatgacaaatgatgtgacataaaacaaccatagtgtatgggtggaaccaagtacaaaaatcagaatgcctgcaaccaaaatcggaagcgacatgagatattgcatctttacttttttagcgagaacagagcccattaagctgccaacaagtagaccggcaccgatcgcgattgtaaagaaggatgtatgcagttcaaaatggtccggtgaaaggccatatttcattgtaaacattggaagtacagcaaatgcgccattgactagaccaaaaacaaaaaagccaaaaattaaagaagccaataatttattttttataatgtaaagaatgccttctttaaaatcttttagagacgttttaatggtcatgcctctccagcctgcttgtccatttggctgacgtgcttcaattggaatgttacatgaacgaatcaggatgcctgaaacaataaaactgatcaaatcaatggtaatggcaccgtgaagtccaattgtcttatacataatcgcaccgattccaacaccaaataccatgaataaactaaacagcatttgatttaagccagcggctttggcatattgatctttatttaaaatcgcctgaacgagagaggcttcagctggatagaagaacttcgtaatggcacttcgtataaacaagatcaagaaaataagtggaagtgaattgaaataaatcacaatgaataaaacaatcgtcagcccagctcgtatccaatcgcaattctctgcgacttttttacgatcaaaacgatctgctactacaccaaccataaaaaagacaaagatcgttggaagtgaatacatgagctctgctaatgtggcataggcgggctgatgactaaaatgatcgagcaaataaaaggcaaacgccatattgcctactgttgtccccatttgcgaagcaagtgctgcaaaaaagagacgaacaaaatttctgtttttaaaaatatccataaatacgctccttaacctgaagatcccactttatatcatataaaattttaagcattcatacaattgatttctcctactggctaatggtcacaggtgttccgtttggaacgattgaagcaagttcgatgacattctgattatacatacgaatgcaccctctagacacagctttaccaattgaagacgggttattcgtaccgtggatgccgtaatgaattttcgataggctcagccaataggcgccaaagggacctcctgggtttggctgtctgttgacaatataataagaacctgtcggtgtcatatttaaaattcttcctgttgcgatcggatacgaccgaataagctgtgatccagaaaacaatacgagacgtttccttgaaatcgaaacagagatgcggtaagggatcgaactaggatcgggcagaccaggaatgatgatgacctcattttgtacaggctcttgaccttgaagtgacggatttgcagcctttaaagcatctgttgttgttcggaaatcaagcgctatagaagcaagggtttctccatttttcaccgtatatcgcagcaccaaaggacactcctttcactcaaataaaagaagccatgatgtccgtcactagatatatatatggacggaatcaggcgaaggaaggtttctcctaacatttgtcatgagaaagatctttgattatacatatgcaaaaaggagcgatttggcttctgtctaaatgcgagaggagagggtgaaaaaggttaattcaggtttggctaaaaatcgaagtggcagtcttgttgtcccaagtccgcggttgacatagattcggtgctgataacttccgtataaaccttccacatatgtatggccgtaaggtgctgtgagaatggggccatagaaaggaagctgcacctgtccgccatgggtatgtccagaaagctgcaagttaatgggagttgtatttaactccaatgctgcatcaggctcatgtacgagcagtaacgtaaataaatcagaggatacttcccgcttaatcaggtcataatccggcacactcatcatcaggtcatccaatgtagcaatctgaatatgcgccccttctttttctaattgaaacacatcatttttacatattgtaaaaccgcaagctttcattgttttctcataaagatcaacgccaaatggtccgtagtcatgatttccgcatatcgcgagcttaccaaacggggcatggagcttggtcaaatatgctttcgctttttcatgctcttcaatcgatgcttgaaaatcaacgaggtcacctgtgaacacaatgaggtctggagactcagcgttgatttgctggacgacggattctaattctttcgcaggaaatgtatcacttaaatgaacatcactaaattgagcgattttaaactggtcaaatgaagctggaagttgagcatcctgaatgatcagtgacacggtatcgatcatgcgtggttcgatgtatctggcatatccgtatccacatgttgtagctaaaaaaccgagaatgctcgcgccagctgctccttttaaaaactgtctccgagaaagttgcttcatataagactcctttataaataaaattaagtatagcatcatatttgatgaatctcccatatggtgcatctagggtcaatcatgatatgatagaaaataatgaatgaatagtcattcaaaaccacagagggggagaacaaatgacgaaacaaacagtgattgtcacagggggatcaagtggaatggggaaggcgatggctgcccatttggcacacggaggctggaatgtcgtgattactggaagaacggaagaaacgttagaaaaggcggcaaatgaaataaagcagaatggcggctcgatcgcttacttccaaatggatgtgcgaaatccagaggatgccgatcaaatggtcaagtttgcggtagatacatttggtgatgtggacgctctgattaacaatgctgcaggaaactttttggttccagcagaaaaactgtctcctaacggctggaaggctgtcattgatattgtattaaatggaacatttttttgcagtcatgcagtgggcaattactggattcgtcaaaagaaaaggggaagtatgatcaatatggtggctacctatgcatggggtgctggtgtaggtgtggcgcattcagcggcagcaaaggcaggtgttttatctctcactcgaacgcttgcagtggaatggggaaagcaatatcgaattcgcgtcaatgccatcgcaccaggaccaatcgagagaacaggcggtgcggataaactgtgggaatcggaagaggcagcgcaaagaacattagatagtgttcctcttggcagactgggcacaccagaggaaattgcagagcttgcgagctttttattatctgagcaagcctcatatataaatggagattgtatcacgatggatgggggtcaatggctcaaccaatccccattttgaatgacgatgtaagacctgcttttgatgtgttataatcacacaaagagagaagcaggtgatgaaaatggtcgatccattggatattttaacgaatattgaagatgttttcccgcactatcaagccatattcagtgcggaagagcaaaaagtgataggctatgagattttaggaagaatgaagcttgagtctgaaacagttagcctaggctccttctttacggattcatctattcctgacgaatataaagtggaagtagatcataaagtactgacgcaagcactcgatcttttcacaacagcagatgatgatttgctcatttttattaatcatgatgcaaatatcctgatgcttgatcatggtgaaagctttttagaacttttgaaggaatatgaagcaaggggcattcagcttaatcggtttgttatcgaatttacagagcatacgtttagcggcgatattgaacagctttaccatacgataacgtattttcgtacatatggtattaaaatcgccatctcgaatattggaaaagaaagcagcaatcttgaccggattgccttgctctcacccgatctattaaaaatagatttacacgcattaagggcatcggctccttctccttcctatgaatatgtcttgtacagcatttcattgcttgcgagaaaaataggggcggctttaatttatgaagacattgaagcaaattttcagctgcaatatgcttggagaaatggcggcagatactttcaagggttctatcttcacgagccggtggcggaattaatcgaccgcaataaacgaaaagatcagctgagagaagaattccagcaatttattgcccatgagaaaaagaaacttcaaactgtctacgaacattctgaaacattttataagcgaattcatcaagcggtcacgacattaaaaaaatcatgcagcacaaatgatgaactcatacaaaagctggcattagaattaacggattgcagctttcggatttatatgtgtaatgaagaaggctttcaaatcactggtaatgtgtttaaaaaagaaaaagaatggctgtttcagcctgaatatatcgagaaaaactggagctggcgcccttatttcctagcgaatattctccaaatgagaatgagcgggaaaggatttttcagtgatatttacagcgatttagaaaccggtgagaggatacgtacgttttcttatccgttagagggagacatgtatttgtttatagaccttccgtatgcctatttatatgagcaagatggattaatttaaaagcagccgtttaggctgtttttttaaatagaaaaaagaaataaaaaatggttgacaatgaaactgataatcattatcatttagttatagagagaagctactctctgttccccaacccctctatcagatcaagatccaaaaaacttggcgctacccccgccaagttttttttgtgcttttcatcttctcctcatgcataggacatcccaattcctccatacatcttaagtgatgatagttagacggtaggagggaacgtcatgatcaaacgcgacaagcggctgctgattgatttgccaagaccagatcacccagatgcaaatggtgctgctgctgtgcaagaattactcggcggaaaattcggtgaaatgtccacattaaataattacatgtttcaatcctttaactttagaggaaaacgaaaactcaaaccgttttatgacctcgtatccagtattacggctgaagaattcggtcatgtagaacttgtgaccacagctgtgaatcttatgattacagggaccacccatggcggagatccagatacgacaccgatgaaagcggctgtcgataaacgaaatacacagcattttattcaaacggctcaaacaggctatccgtttgattccatggcaaaaccttggaccggggagaatgtgttctcaagcggcaacctgattcttgacctccttcataacttcttccttgaatgcggagctcgtacacacaaaatgcgcgtatatgaaatgacagatcatcctacagcaagagagatgatcggttatttactcgtcaggggcggagtgcatgttgtggcatatgcaaaggcgcttgaggtagccacgggtgtagatctaggaaagatgttgccgatcccaaacctcgacaacaaatactttgattcagcgaggaaatttgaagaccaaaatgtccatacaaagctgtacacatttagtgatacggattacaaggacattaataagatttggaaaggcaaccatccgattgatggaaagccgctcacagtgattgagggtacgcctcaaggagcacctgtgccagattatagagaattaccggaagagtttgccccaggcatttccaaagaggattttgacgaaattgccaaacggctgatgagatctgcgggtttataaaaaacatggcgcatgagatcagaaaaaagactcaaactaaaaaaacagattctttttctttttttgaattcaagaggaaaaatatcatctgagaacactttatggtatgatgctttgtaggacttgtgtataatcaatacgggttcatcttgagttgtttttttgaaaggagtctttttttagaatgtcacaattaatgggtatcattacaaggctgcaaagtcttcaagagacagcagaagctgcaaacgaaccggcacagcgttatttcgaagtgaacggtgagaaaatctgtagtgttaagtatttcgaaaagaatcaaacgtttgaattgactgtttttcaacaaggggataagccaaatactttcccatttgacaacattgatatgatttcgattgagatttttgagcttctacaatcctaagctgaatcgtatgaaatgttttttctaaggattccttcgtttatttgcggcaatatacatgtgtcattattggctgtgtacaaatggaagatgatcaatcagcgcatatttcggataagagaccattaaaaaggagttcctttctgtgagtgattctttttactacaatctttctgaagattatttagcgttttctgatgtcgtcatgagaatgaaagactttattcgaaaagaccctagatccgcctatgtgttatcaattggtacggactctcaggtcaatcaaaatgtcacaagatttatgactgcagttcatctccaccggattggcaaaggggcttggggctgcctcacacaacaagtgatcagcaggcctgtgcaaagtcttagagaaaaaatttcattagagacagcgtttagccaaaaggtatgtgcagacatccttgagggacctttaacagaactgatggatttgcttcttccgtttgctgaggaaggggcagacctccggtttgaagcccatctagatattggaaaaaaaggaagtacgaaagagctgatccaggaaatgaccggaatgatcacagctatgggaattgaagctaaaataaaacccgactcatacgcagcattttgctatgccaatcgatacacaaaataaattccgtcatttttctccaaaccttgtcgaaacgtgcggttgacgattcgattctagttccttattgtagctgtatagagaggaagcagacattcaaaagcctgctaatcaatataaaagcatatatgaaacagggggcctgatgttggatgagcgtcatcgaaaatcgttttaatgaagaagagaaaaagctattattaaacgtattgctgaatcaggaatatgctgtcgaattactaagcagtgagatcaatgatatagaatgtggaacaaaaaatgtcgatgacaatacgtataagcaattgatcacattgtatgacagagtaaggtttgagaattaatattgatttaacattctattagatactcgggagctgagtatcttttttatgcagaaaaaatctttcgacaaatttcgttttagtttatgcttaatggtaaaggggaatgtatgattgatgatcgagagaaaaggggtcgaagaaacatgatagagatagaaccaactcaattgcttgagtcaacaatagccgagcatatgattgatgcagataaagtggcacatgttcaaattggaaataaccttgagcatgccttattggtcctaacaaaaacaggatatacagccatcccggttttagatccttcttatcatctgcatgggttaattggaacgaatatgatcatggataagatctttggtttagaacgaattgaattcgaaaagctggaccaactgaaggtagaagaggtcatgctgactgatattccaagacttaaaacaacggaccctgtgctaaaaggcgttcacgctgtgacgaataatggatttgtttgtgtagaaaatgaggagcaagtctttgaaggaatatttacacgacgtgttgtattaaagcgcttaaatgaagtgattcatgccgcgaaaaaatgagctgaagcccagcttattttttttgccttcataagctataatttatataatgaccatatggaataagaaaatcttatagagagaaaggggacgcccatgcagcttcaggagttacatatgcttgttgtgcttagtgaagaattgaatatgagaaaggcttcggagcggctctttgtctctcagcctgctttatcccaaagattgcagacgatcgaaaaagagtggggaaccaaaatcttttttcgttctcagaaagggctcaccgtgacttcggcaggtgaacagatcattcaatttgcaaaagaggtgacggttgagcaagatcgagtgagagaacgaatcgatgaacttgaaggggaaattcacggtacactaaagcttgcggttgcatccattattggacagcactggttgccgaaagtgttaaagcggtatgtcgaaaaatatccaaatgcgaaggtatcacttgtgaccggctggagtagtgaaatgctcaaaagcttatacgaggaccacgtgcacattggaattattcgcggaaaccctgattggaagggaacaaaggaatatttgatgacagatcatttatatttagtcgattctgtcatcaaagacgtggacgagttaatcgagacagaacgcccgtttattcaatttaaaagtgacagcacgtattatcaggaaatccagcactggtggcaccaaaaatttaaagtgtctccaaagcagacgattctagtggaccagattgagacatgtaaacaaatggcctaccacggcatcggctacgccattttgccttcagtcaccttatatgaccacgaaaaaagtgttcataaaacaccgcttgttgacgtgaatggagagcaaatcggacgtgacacatggctgctaggctatgaagcttcttttcaattaaaacaggtgcaagcatttgtcggtgtggtcaaagaaatgcttgaaagtgatgcggtgtaagtaccttcttggaagaggaaggtgtttttttaggtaaataatcagtttgattaaatttacttattgcacgcatatccaatagatagatggagcgaatcatagaggagacttcgatcttatgaaaaacaatcaattaatcaaaatgaacaaacctgaatggggagatcgtttgcgcgtgaggtggcgtgaacgttttgctagtcatctttcaattaaagaacaaaacgagatatcaatagatgattttttatggcatttatgcagttttggaatggttacatgccttgaaaaggctgaagcgatagacgcattttttcaccaatcaaaggataagtgtactgttttttatcaatttgttgacgaggcgtatcttttcgaaaatgccagctctcttttaatcaatgatttaccatatgagtctaataatatggattataacgatatgtatgtgatggattggaatgaaaaatggacatttgtgatgacgcacgaaacggattatggtccatattttattcgaatagatgaattgaacgaatgaggaaccgatgatctcttcgatatgaaaaacccgccttccaattggaatgagcgggtttttcattgggttatagtaatgattggtcaaagctttttcataaaatcatttgacaatgaaaatcattatcatttaaagtgtacatataataattgaaaatgattatcatttagatgaggtgaccgatagatgaaagcactaattgcatttgcgagtatgtctggtaatacagaagatatggcagcaatcataaagcaaacacttgaaggaaaagggatagatacggagatgatggaatttgatgatacgaatgcagaggacctttcttcatacgattatgtgttcatcggttcttatacatggggtgatggtgatttaccttatgaagctgaggatttttatgaagaggtctctacgcttgaactaagtgacatcaaagcagctgtgttcggatctggagattacagctacccgaagttttgtgaggctgtccatacatttcataacatgctcaaatcaaccggtgcatccgtatttcctgaaacattgaaaatggagcttgcgccagatacagatgaggatgtggcgtgctgtcaggaatttgctacgagcttcttaacgtgggcggcgttatctgagaaacgagttgaaaatcatgtttcataaaggagcgacagctgttgctgcttctaaaagtggtggatactttgtcgctgtaaaacgggaaggtatttttcactacagtgtggagagcgggtggcagcagctctttaagctcaagcataaaattcatgccatcagctatatcggaccttatttattcggtgttggtgaaaatggcacagtgattagatcaggagatgaaggcaatacatgggcgctatcatcatttccaacaaatgcagtcgtttggtctattacaggtcgcaaagacgggtttgtgtgtgcacatggaaaacatagtatttatgtgtcaaatgatttcgggatttcctgggaaattatgaagccatttgctcatgtgaaccacccgcctgttattcgttctttatgtgctgcaggtgatcacctttatattggaacacagattcatgaggttcacggaggaatatggatgtatgacttggagagtgagcaggttttcctcctaaacagagaggagcaccggatgacagcttctatgctgctctgtcaggaacatcttcttgtttgcgcattaggatcaaaaaaaggaaaaaaggggtctgttcaaattttagatttacatacaaatatgctgcatgatattcaatcacaggcctttgctagagaggaatcatttttggatgtgtcagaggataatggaattgtatatgtgaccacctcacaagatgaacacggattttctaaagtgtatcagcttgatattgagcaaaaagagctcaaatggtttgatacgatcaaaggacacggttttcgtgtagccaatcaaaatgaaaactttttctgtgctggtttatatgaaagcaagtttgtgaggccatatgaggagccggcattgattcattgataaggaggaagaaaaagtgacagaaaaggttttattggtgtatgccacgatgtctgggaatacagaagcgatggcagatttaattgaaaaaggaataacagaagcgggagctagcgtggaccggcatgaagcgatggatattgatgcagagcttctcaatgattacacgcacattatgttaggtgcgtacacatggggagatggtgaccttcctgatgattttattgatttatatgaagaaatggaagagcttgatttaacgggaaaagcatttgctatattcggttctggggatacatcttatgagcatttttgcggagctgttgacctaatcgaagaaaaagtgaaggaacttggcggtgacattgtcttgccatcagtcaagattgagctgaatccagaaggagaagaagaagagaaattgatttcttttggcaaacaatttgttcatcttcaccagcaggaagcggggtaatcggtcccgcttgttttattttccattgaagagtcaactctttcacttgtcattaaaactctcctttggtacagtaatgaagtataaattaagaggaggacatacatacatgaaacaaatggacgctaatgaaattatttcatttattcaaaatagtacaaaatcaacacctgtgaaagtctacatcaaaggtgatttagaaggtattaaatttggtgaacatgcaaaaacgttcatcacaggaaacactggagttgttttcggtgagtggagcgaaatccaagaagcgctggaaacgaacaaagacaaaattgaagatgttgtcgtggaaaatgaccgccgcaactctgcaatcccgatgttagatttaaagaacattaaagcacgtattgagccaggtgctatcattcgtgaccaagtagaaatcggtgataatgcagtcatcatgatgggagcttctattaatatcggttctgtgatcggtgaaggtaccatgattgacatgaacgtggtgcttggtggccgtgcaacagtaggtaagaactgtcatatcggtgctgggtctgttcttgcaggtgtcattgagccgccgtctgctaaaccagttgttgtagaagatgatgttgtcatcggtgcgaacgctgttgttctagaaggtgtgacaattggtaaaggtgcagtcgtagcagctggtgcgatcgttgtgaacgatgtggagccttacacagttgtagcaggtacacctgcaaagaaaatcaaagacattgatgaaaaaacaaaaggtaaaacggaaatcaaacaagaactgcgtcagctttaattcacataattcgcagttgaagacatagacgtggatgatatatatccacgtcttattcgtatagaggaaaggaagcgagttcacttgttaaatcgtgagcaattaatatccattcgaagagatttacaccaaatccctgagcttggttttaaggaattcaaaacacaagcgtatctcatcaagcatcttggtgcttattcaaaagatcgagttgagatggaaacgtggcgcactggactttttgttaaagtaaagggaacaaatcctgagcgcgtttttgcttatcgtgcagatatggacggcctctctattcctgaggagacagggtatccatttcaatcagtacatgaagggaacatgcacgcatgtggacatgaccttcatatgaccatcgcacttggaatcattgatcatttcgttcatgagccaatcaaagaagatctattatttatgttccagccggcagaagaaggtccaggcggagctgaaccgatgcttacaagcgatgtgctgaaaaagtggacgccagactttattacagcgctgcatattgcacctgaatatcctgtcggaacgatagccacaaagccagggctgttatttgctaatacgagtgagcttgtgattgatcttgaaggaaaaggcggacacgctgcttaccctcatttagcgaatgatatggttgtggctgcgagtgcacttgtaggtcaactgcaatcggttatttctcgtaatgtcgatcctcttgatagtgcggtcattacgattggcacaattaccggcggaacggctcaaaatatcattgcccagcatgcaaagcttgacggcactattcgtacactttcaccagagtctatggataaggtgagaaagcgaattgaagcactagcaaaagggattgaaattggctacgaatgcaaggcaaccgtgcgatacccttcatcttattacgaagtggacaattcaaaggatctgacagaggaatttatgtcatatgttgccggagaagggcttgcgaatgtggttgaatgcagagaagccatgacaggagaagactttggctacatgttgaaaaaataccctggattcatgttttggttaggggtcgattcagaatatggcctgcatcatgcaaaactcatgcctgatgaaaaagcgatagaaacagctgtaaacgttatgacagcttatttcaaaaagcaagcaggtgaatgaataatcaagctgcctcctgtacaccttatgaacaggaggtgttcttgattatgacaaaaattggtgtagaaccatctttatccgatgtagaagaactactgaagcaaaaagggtatgacgtcgtacgtattcaaaatgaacagcaaatggatcagtgtgactgctatgtggtcacagggctggattcaaatgttcttggcatttcagacacaacgacaaaagcatctgtgattactgcgtcaggtatgacggctgatgaaatttgtcaagaagtagaacagcgtgttcaataaaacaaacaagaaaaagaaccggtagattataaccccggttctttttgctctttttctatatcgagtacttctttcatttttttgcgcaagattcgttctacccgccattgctccattgtttcggttttagctatgatgcgcagtacgagggaagaggagccgaacgcctccacgccgacaacttgaggtccttcgataatttgagggatttcttcccgaacctcatcacacgcagcttgaagggctgtgatcatttgatccacattctcttctggagataactcgatatcaacgagtgcctgcatcgtccctcttgaatggttgctcacgttcaatatacttcgatttgggataaaatgaagggtgccgtcaaagcttcgaagctgagtggttctaagtccaatttgttctacgatcccatcaaagccagcaactgttatatattctcccacatcgaattgtttctctaataatataaagaatcctgtcacaatatcactcactagtccttgagcgccaaaaccgatcgcaagccccacaacgcctgcgccagctagcaaagcggtcgggttataatgaaataagtcgaggatcatgaccactagaataaaaatcaatatgtaggcgaaaatatttaacgtgagactttgcagcgtctgagctcttgataaagagacgtcatgcttttcagagaatgtggaataggcacgcctaatcatcttgtttccgatgactctgatgataaaataaatcgcaaaaataacgattagttttagcaaaatcatactgctattgaggataatggaaacccaatctacttgttcaaatgctttcatgttcttcaaaacctttctatgtatgctctaatagagaagctaatcatttgttcccttatgcaagacatgttaaacttttgtttaagtggagcaagagattgtgacaaatcgttaattaaatttattattaattaatattgactaaaaaccgcttaagtattataattgtaattgtgaagttattaactaaatgagaatttcaacttttgattctcattttatatacagcttagaagtctgtataaagatattattttttggagggatttacatatggcagagcgttttgtaggaaaacaagctccacgttttgaaatggaagcagtacttgctaacaaggaatttggtaaagtgagtttagaggaaaacatgaagaatgacaaatggacagttcttttcttctatccaatggatttcacatttgtttgcccaactgaaattacagcaatgagcgatcgttatgatgagttcgaagatttagatgcagaaatcattggtgtatctactgatacaatccatacgcatcttgcttggatcaacacagaccgtaaagaaaatggtctaggtgaattgaaatatccgctagctgctgacacaaaccacacagtatctagagaatacggcgttttaattgaagaagaaggtattgcacttcgcggtctattcattatcaacccagaaggcgaacttcaatatcaaacagtattccacaacaatatcggtcgtgatgtagatgagacattacgtgttcttcaagcattacaaactggtggactttgcccagctaactggaagcctggtcaaaaaacactttaattgatagctgaagaaacaggagggtctaactgatgttagacctttttgtttcgacacatacaatggatggaggcgcttcaaaatgaaattacgtcaaccaatgccagaactaactggtgcaaaagaatggttaaatggagaagtaacaaaagaagatctaattggtgacaaaccaacattgattcatttctggtcagtcagctgtcatctttgtaaagaggccatgcctcaagtcaatcaattctgtgatgaatacaaggatcaactaaacgttgtagccgttcatatgccgcgttcagaggatgacctagatctagataaaatcaaagaggttgcgaaagagcatgaaatcacgcagccaatttttgtggacagtgatcatcacttaacagaagcctttgaaaatgaatatgtaccagcatattatgtatttgataaaacaggtgctctgcgccacttccaagctggcggaagcggaatgaaaatgcttgagaaacgtgtcaatcgagtgctttctgagtctgaaaaggctgcagaataggctttcccccataaatgggggttttttcatggacaaaaataggcgacctattgcacggaatggactttttatgtacgtgtcattcctaagaaaagagaaattgagggagtttattaaaaaatattcctgaaacaaaagggcattaagacctatttacttttttgttttgaaatgaaaatgtaaagattttaactttttactattcagaacgtttttgcacaaaagaaatttcagtttggtaaataacgatgtaaatcaagtagtataagtgtttattcaaattttttacaatattttaaagtttgtcaaaagcctttagtggcaatgaaatggatgccgattgttcctctttggcaaaattttagttgaaaatacctatctgatagcaaactgtaaaatgataaaaaaatagttgataaaattagttttctaatctaatatttactatagaatattttttatatgatgagggggaaatccattgtttaatgagagggaagcgttacgattacgattggaacaactaaacgaagcagaagtaaaggtcatccgtgaatatcaaattgagcgagatgcgatttatgcaaaattaagagaattagaccgtcaaggaacaggtctagtgtcagatacaaaaaaagaagtgcgtacagaaagaaagacggattcgctgcctgtattagctgaactggctgcacaagaaatgagaagctaccagccgccggcacaatcacaatcaaatcctgcatcatctttaggaacaggacagctaaacggtgtacctgtaggtattcctgaaggatctactagacgcagaagaggcacagcccgccctggttcaaaggcagctaagcttcgtgaagctgcgattaaaacgttaaagcgtcataatgcggcgattaaaagctctgagcttcaaaaagagattgaaaaagagagcggtcttgaaattccaaatatgacaacgtttatgcaaagcttaattaaaatgtatcctgaagtgaaaaagccatatcgcggacagtatattttagaaggcgacattcaaacagaagacgaataaataaaaagaaactgctgacgtaaaagccagcagttttttattgcgagaattactttttttggtcaactgtatagacaatttttcgttcctttgacaggtgatcacgctgttttttgaagccatcgatcttcactgtcatgacctctccatttcgccgcaccgcatcgacttgtgcctggagtatttgaacttgttcgttcagctttttcaagatgggttcgatttcttccgttgtttgcaggaagctgtctcgagagaatggctgtgaatttgtttgagctgactggtcaatatcagcaaaatgagatgcgatccattcctcactttctgctaactgcttttgatagcttgtgagcgtttcataaaaaatcgtttcctttgctttttcaatttgcagtaatttctcttgtgtttcataaaaacgctcctgaaggtgtctgacgccttcctgtaataaatggagctctgcgtttttatcacccaatgtttgctgcagtttctcaatcacagcggataaagtatttccttttttctcctcttttgcaagccgttgatcttgatcttgcatccgttcatttaattgttgagagatttctttatatttgatcacttttaaatgcagccggtgtttttcttccgtttcttttcttctatgaaaggtttccttttgcagcatttcatgaagaaggactattttatgtaataattcagatttgctgtaggagagatcctgtatttttgaggctgcatcgtcttgatcaatggtcatttcatccaattgttgttttaatagcgtgtaatcctttttcatctcatgatattcttgagttaacttcttatttttagaatacgtatatgaggactgtaaatcagagatcatttgttgatatttggctgtttcagcttttaagtataaattctcttgagataggtcatggaataggggagaagcatggcgcctgttcatagatagaccctccttattcatgttaccaataaagtatgcgaaatgagtgcgattagaacaaccatatccaaggagggtgagagaatggatgtagtgaatgtcattttagctggaggagcttccagacgttttggagtgccaaaggcaagccatatgtatcaaggaaaaccactatatgagtatgtggaaaatcagcttttgaaaggacagacggtcatcatcagccatccatcacttctgcccttttttaaagaaagaggtgaacgaagtgtgtggttagatgatgaacaggtgcgcggatgcgggccgcttgccggcatgtatacggcgatgcaaaagcaagaagcagcatggtatttggtgatggcatgtgacatgcccttcatacggagggagaccgccgaagcattatcgacctattgcagcgagcacgtagatgctatcatcccgcttgttcagggcagattacagcctttatttgcgctttatcaccgccgctgtctgccgtccattgatgcgtgtttaaaagagaatcaattagccatcaaagagttacttcaaaggcttaaggtgcgcatcgtcccagaggaggaactgaacgtaacaccaaatgaatttcgaaatatcaataaaagaagcgatttacctgaaaacggtatgatatgatacataaaaatggtgaggagagaacagcattgaatgaccgatattcaagacaaatcttgttccctccggttggggaaaagggtcagcgtgcgcttgctgacagtcatgttctgatcgttggagccggtgcacttggaactgcctccgctgaagggcttgtccggtctgggatcggcacgttgacgattgttgatcgtgattatgtagagttttcaaatttacagcggcagcagctgtacacagaacatgatgcaaaggcacatgtgccaaaagcagctgcggcaaaaaaacgtctccaagagatcaatcatgaagtgatcatacacgccctgattgaagatgcaggcgcgaggctgttaagaccgttatttcagagcgcagatattgtcattgatgcgacggataattttgagacgagaatggtgatgaatgatttatcgcaggaaacgaagacgccgtggatatatggcgcttgtgtgagcagccaggggatgtatatgaccattttgccggataaaacgccgtgtttatcgtgtgtctttacagaactgcctgttggcggcttgacgtgtgatacagcggggattatttctccagcagttcaaatggtttctgcttatcagcaaacagaggcgctaaaatatttaacaggacatgaagatcaaatcgaacggaaatttgtcacatttgatctttggcaggcgacatcgtttaaaatggatttgtctcgtactaagcagaagaactgcccatcctgcggtgaagaaagaacctatccttatttacatgagcagcgtaaaaaaacgacgattctttgcggacgggatacagttcaagttgtatctaaagatttagcaaatctatcatttcagcatatgaaagagaggctgtcatctatttgtgaggtggaagtgaatgacttcttaatccatgtccgctatgaatcttatcgtattgtctttttcaaaggtggacgtgcattaatccatgggacgaatgatgaaaaagcagccaattcattactagcaagactgctagggatataggagtgaagtgtgatggaaagacgtcagccaattccagtagaagaagccattcagaaagtccatcaatatgaaaagcatggagaagcagaatgggtgcctttaaaaaatagccttgaaaggttcattgcagaagatattttagcagatcatgatgttcctgcatttgatcgttccccgtatgatggttttgcacttcgggcagaagatacaaaagaagcgtcaagcgagcatccggttgaatttgaggtcattgaccatattggtgcaggaatggtctcagcaaaaaccatcggtccctttcaagccatccgtatcatgacaggagcaaaaatcccggatggagcaaatgtcgtcatcatgcttgagctgactaagaccttcgaaaaagacggcaaatcatacatgtcacttaaaagaccgctgaaaaaaggggacaatatttctcgtcaaggagaagaagtacttgaaggaaatgtgatggtcaaaaaaggaaccaaagtaactccgggcgttacggccctattggcgacatttggatatggtgtagtgccagttgtcaaaaagccagtgatcggcatcatctcaacaggtacagagcttcttcaagtgagtgatgcgatggtggacggtaagattagaaacagtaatcttagtatggtttatgcccagatacttgaggccgggggagagccgcttgatttaggcggtgtgtctgatgattttgacaaaagctatcatgcagtcaaagcagccttaagcaaggtagatttcttaatcacaacaggcggtgtgtcagtaggtgattttgactttctccctgcgatttatgaaaagctgggagctgaggtgctgtttaataaagtggccatgagacccggaagtgtgacgacggttgctgcaatgccaaatggtcaactgctgtttgggctgtcaggaaatcccgctgcctgttttgttggctttgaattatttgtgaaaccgatgatctataaatggtctttgaagaagcagccgtttcctgcttttgctgaggcgaagctgacacacgattttccaaaagccaatccgttcactcgatttgtcagagcggcactacaattcacgggcagtcagctcagtgtgaccccaacaggtcttgataaatcaagtgccgtgacctctattgcagatgctaactgtttcatcgtgctgcccggaggaacaagaggttttaaggccggtgatcaggtccatgttctgctgtttcagcacgaaggagagggttccccatgctggatgacacattaagcatattacaggtggtcggttatcaaaacagcggcaagactatgttgattgaaaagctctgtcagctggctgtacttgacgggctgaagctaggctgctttaaacaccatggacatggcggtaaaccagatcgtcttttgaaagaaaaagacaccgatcgatatgttcaagcaggtgcatttgccgctggcgtggaaggagagggtgaatttcacttttcaatgcagcacatcacgttagagcagttgctcaacatgtgtcagcatcttccattagacgctgtcttgatagaagggtataaacaggcaccataccgcaaaatcgtttgtgtaaagaatgaagaggagctcattgatctttcaactctttccaatatacaagcagctatttatttttctcaagagtttcaattaatcgaaaattactcgtttccagtgttttcagcctttgaaaagggcgcagtcacatttggttttaacttattgaagggaggcgtctctgcttgagtgaattttttaaaataacaaaaacgccgattgatgtaaacgaattgattcagcatgtgacaaggcgaaaggcaggggccattacgacgtttatcgggacggtcagagagtggacaaacggcaaaaaaacattgcgtttaacttatgaagcatacataccaatggctgaaagcatgctaagtcaaattggacaagaaatcaagaaacggtggcctgaaactgaagcagccattgtgcaccggatcgggacacttgatataacggatattgctgttgtgatagccgtttcatctcctcataggaaggctgcatacgaagcgaacgaatatgccattgagcgaattaaggaaatcgttccaatttggaaaaaagaatattgggaagacggggaagcctggataggtgatcagcttgaaacggtttcatatccagaggggaaacctagcgatcttcaacttgcaaagaaagaaggtgatcagcttgattagtgtattattgttcgccggccttgctgagaaggccggtaaacaacaaatcatcattcaaaaagatcaaacaacggttgatgagattaaattagaattacaggaggtatatggtgttgatgctgcacaaaacgtgatggttgcagtcaacgaactatatacgagggaaaacgctgaagtgcgtagcggggacactgttgcattcattcctcctgtaagcggtggataatagatattagaggatttggttatggccagcggctgtaaccaattttttatgtgtgaaaagattgtagaggtatttgggtgtgatcttcgtaaataaaacatccccttcgtgctttagaaatgtgagggtcgagctgctggatcagatcatacaattcgctaattcgtctcacattgaaatctgtctgggcttgaagctgttcttttaattcttttgtactcacaatgcttccctttttctctttaataatatctacgcatctagcagcgtagtatattttgtcattagagggtctgctttctttcatatcaagtaatttgagctcatgataaattagttctctttcctttcgaaagtattgccatgcttcttgttccttttcataaagtaaaatcaattgtgttttcaatttttctcttaacattcacttgactccatttccactatcatttaacctacctctattttacattatatgaaaaaataacttttgatcaagtaaaaaccttatatttttcattttttaatatgaaagtattgatactaaaggctcatttgttctataaaagaaaccaatcatagtcctataaagccgggatttgtcgaaattactaggattattttaacaaaaaattgttgtgtctaactaagaccatccgaattcaaaggaaaaggatatttattccgaaagacatgtggttttttgataaaatgtttttaggtcagtaaaacctctattttttgatatgaatatggtctggtcatggtgtcatttggaggatgtcattcgtgataatagaataatagataaattttttcctcaatgaaaataagaaaatcaaatcatccatcacttattggcaatcttttgataaaatagaaagaacaagagagaacatgtgcgtttgcatacttgcatgacatagagaggagacatttgatgaaagaaaatatgcaaaagcccacgatcattggagtgagcacaagaccttcagagcacctgaaaagagtatgggaaaacccggtggtttggtggcctttatcctgtgtgcttcttttaacagtgattgtgacttatttgtcagagctagtgaatgaaggaatgtgggcagatttaagcttgccggtatcggtcgtttatgtggtgacgctaattggtctaattctcggacttgtgattaatgctgctatatataagttcatcgtatttttagcaaagggtgatgcatcgtttcagcagctgttttcagcggtcctgtttattacaccagttacgatcattggtacgattatttctcatctgtccgtcatcctgttccatgtgccaaaaaacatcacaatcacctcattaaatgcactcattcaaacttctggtccatggctcggtgtgtttgctaatattgatctctttgtgatctggaatcttgttttaacaggctttttattgatcaaagtcggtcatatatctccaagaatatcttggatcatgataggagtcttttatgtcatttctttcattcttcaatatgtaggaaccgcaatcaacatatcagtaagctgggggtagaatgtctttatgagaaagaaaatcatcatcggatccatttttattattgtcatcggtctatttattggctttaacattgcgaaaaatcaatcaaagcctgcttcgacagcagctattaaaacagtaaaacccacacaaaaagaaatcaccactacggtaatgacgccagggacactttcattctctgaagagcagttcatttatgcagaagaggaaaaaggacacttgaaggggatttctgtgaaagaaggagaaaaggtaaaggctggaacgccgcttcttacatatgaaaatagggagctggagcttgaagagcagcagcaagctcttgcggctgaatcaagtacgctaaaacgcgaacaattacaaaatagactgagcgaattagatgaaaaacaagcaggcgactcagtcgcccatcctaaaaacgagcgagaccagctcgaattagagctgaaagcggctgaattagaacaaaaacaagcagagatcagccaagaaaaagtaaaagcacaaatagaagatttaaccgtacatagtaaaattgacggtacagtgatttccattgagcaagaagaaggggcaggaaagccggaagaaagacagccgatcattcatattggcaatgagaaaaaaatgattgtgcgaggattgatttctgagtatgacgccataaaagtgaaaaagaaacaaaaagtaaaggttacatctgatgtcattcgcggaaagagctggcaaggggtcgtgaaaaaagtgggggctgtacctgctcaggcagcatccgaaacaactgcgggtgatcaaacggtacaatatcctgttgaaatcgaaataaagggaaaaaaacctgaagcgaaacctggttttaaaatgatcatggaaattgaaacagataagcgtcaagcccaaacgattcctgaatcagctgtaaaaaaagaggatgatggacaatacgtttatattgtcaaaaagaatgtacttaaaaaagtaaaagtggtgctaggggaaacgtcaggtaatgaccttgaagtgacaaaaggtgtcaaggcagaggatcaaatcattgctcatccatcagatgacatgtatgacggaatggaagtgaatgctgaatgattcagctttcaaacgtgacaaaaagctatgaggtcgcccaagaaacatttgatgtattaagtgagatcgatcttgtcattgaaaaaggcgagtatatgtccattatgggcccgtccggctctggaaaatcgacgttaatgaatatcattggctgtttagaccgaccaaccacaggacaatatcattttcaaggaagagagctgtcagctgcaaaggatcaagagcttgcagtgattcgaaatcaattcattggatttgtctttcagcaatttcacctgctgccgaggttaaatgcgaggcgtaatgttgagcttccgatgatttacgctggtatcagtcaaaaggaaagaaaagaacgcgcagaaatggcacttgaaaaggttggtttggcagaccgaatgaaacatatgccaagtgagttgtcgggagggcaaaagcaaagggtggcaattgctcgtgcaattgtcaataagccgcagcttatcttagcagatgaaccaacaggtgctcttgactcaaaaacaagcttcacaatcatggaacagtttactaagctgaatgaggaggggacaacgattgtgcttgtcacccatgaagaagaaatggctgcgtatacaaatcggacggtcgttgtaagagatggacggctcgttgaagatagattgacacaaggggacgctatgaatgaaactctttgaaaatatcaaaatagcgatgaattctgttttagctcataaattacgttctattttaacgatgcttgggattattattggtgttggatcggtcattgcggtcgtggctatcggtcaaggcggcgagcaaatgttaaaagggtcgatttcaggtccaaacaataccattgatatgacatatacgccttctgacgaagagttaaatgcaaatccaaacgctttattcgacgccacatttactgaggaagacataaaaagcattaagacaatcaacggggtgaatcaggttgcctcttcgactgcacaaggaatgcagctgagatttcaagatacgacagtggatgcgacagttaacggtataaatgaagggtatacgaatgtccattcattacaaatagcagaaggacagaatttaagagatgttgactttagaagcggcagaagagccgctctcatttctgaaggcttacaaaaagaattatttaatggacagaaggcattgggcgaaatgatttggatgaacggacagcctgttgaagtcatcggtgttttagcaaaacagaaagggatgttttcatttgatatgaacgaaatatttgtcccgtttgctatgctcacctccacatttaggatcaatgaatatgataagttgtcaattcaagtcgcacatgctgatcaaatgaaggaagtaggaaagaatgcggctgcattattaaatgaaaatcatcatacagaagatgcttatgaaatgatcaatatggaagaaatcgcagaaggcattggtcaaatcacatctgttatgacaacaatcattggctcaatagctgggatttctttgcttgtcggcggtatcggtgtgatgaatatcatgcttgtttctgtgacagagaggacaagggaaatcggtatccgaaaggcgattggagcaacaagggctcaaatactcgttcaatttttaattgaatctgtcgtcttaacattgatcggcgggttgatggggatcgcacttggcttaggtggcgccgcgctagtatcactagttgccggctggccgcccttagtatcttggcaagtcatctgtggcggtgtgctgtttagtatgcttattgggattgtttttgggttaattcctgcgaataaagcagcaagactagatcctattgattctcttagatatgaataatttggagaagaacaaaagcatacaaacagcgtgaattcgcctgtaatccaccatcaaaagcttttatgcacatcgcataaaagctttttttagttccattgaatgaaatgaaaaatgatagaaatgctaagatcatgactttcatcttaatgtcacatatttttcagtttacaaatggtacatataaaggtaagatgaccatggtgaaagattttgatagttattgaatgtatttgattgttttgtattgataatgttgaaaaaagcgattacaataaaggtgcgcgcgaaatgaatacgttttcaaaagggggtgttttcatgttgacaccggaaagacatcaactcattatcgactgtttagaagaaaatgatgtcatcaaaatacaggacttaacgattatgacggatgcttctgaatctacaattagaagagatttatcagcccttgaagaaaaaggatttcttaaaagagtccatgggggagcagccaagatatcaagtatccgtcttgaaccagatgtatttgagaaatctgccaaaaaccttcaagaaaagtcattggttgcagaggcagctgcttcacttttaaaacaaggcgattgtatttatttagatgctggtacgaccacacagcaaatgattgaatatatcgatcccgatcaagatattgttgtggtgacaaacggtgttatgcacattgaagcactcatgagaaaaggcatttctttttacctgataggcggatcagtgaaacatcgaacaggagccatggtgggagccgcagctttgacagcgatggaaaattaccgttttgacaaaagctttgttgggacgaacggcattcatcccgaggcggggtttacaacacctgatccagaggaagcgctcatgaaaaaaagagccatgaagcaggcgaaaaaaacctatatcttatcagatgcctctaagtttggcgaaatatcgttttcagcctttgctagtttacaggaagccaccattatcacaaacgacgcaaaagaggattcattcgataattaccatgaaaaaacggttataaaggtagtgaaaacatgatttatacagttactttaaacccatcagttgattacatcgtacacgtggaggatttcgcagtcggcggtttgaatcgttcaacctatgacaaaaaatatccaggtggaaaagggatcaatgtctcaaggcttttaaaacgtcacggtgttgaatcaaaagcgcttggattcataggcggatttacaggaaaatatattcaagactttttacaaaacgaacaattacaaacagcctttcacgaggtgtcagaagatacacgaattaatgtgaaactaaaaacaggtgaagaaaccgaaatcaacggactcggcccatctattactgaagcgcaatttgagtcgtttctgtctcaattttcttcattgactgaaggagatgtcgttgtcttagctggcagcattccttcttcattgcctcataacacgtatgaacgtattgctgaggtgtgcgaaaagcaaggtgtcagagttgtccttgatatttccggggaagcactaaaaaaagcagcaggcttgaaaccgttcttaatgaagccaaaccatcatgagctaggtgaaatgtttgagacgagcatctcatctgcggaagaagccattccttatgggaagaagctgttagaacaaggtgctgaacatgtcatcgtatcaatggctggagatggagctctcttattcagtaaggaaggggtttatcagtccaatgttccaaagggcacgcttgttaattcagttggtgcaggggattcagtcgttgcaggatttttagccggcgtttcgaaaggcctttcgattgaagaatcatttaagcttggcgtcacatcaggcagcgctacagcattttctgaggagcttggaacaaaagagcttgtcgacacactattaccacaagtaaaagtcacacgcatttaaaggaggagtcatcatgaaaattacagaactactcacaaagcagacaattaagcttcaattagacagccagcagaaagaagcagtcattgaagaactagtcactgttttagatacagcaggcaagctaaatgataaagagggctacaaagaagcagtgatcaaccgtgaaaaacagagctctactggtattggcgaaggaattgctatccctcacgctaaaacagcaagtgtaaaagagcctgccattgcatttggccgttcgacagctggtgtagattatgaatcactggacgcgcagccgagtcatcttgtctttatgattgcagcaactgaaggcgcaaacaacacgcacttagaagcactttctcgtttatcaacacttctcatgcgtgaagaaatccgaaagcagcttcttgaagcggctactgaagatgaaatcatcgatatcatcaatacgcatgacaaggacgatgatgaagaagaagaggaagttcaagaagagccggctgtatcaggtaaaccagctaagattttagcagtaacagcttgcccaacaggtattgcgcatacatttatggcagcagatgctttgaaagaaaaagcaaaagaaatgggcattgacattaaagtcgaaacaaacggctctggcggtattaaacacgcccttacggcaaaagaaatcgaagaagcaccagccatcattgtggcagcggacaagcaagttgaaatggaacgctttaaaggcaaacatgtcattgaagtacctgtgacagctggaatccgccgtcctcaggaattaattgaaaaagcagtcaatcaagatgcgccgatttataaaggctcaggcggcagttcttcaaaagacgaaaatgagtcatctggcaaaggtagaagtggtttctacaagcacttaatgagtggtgtaagcaacatgcttccatttgttgtcgggggcggtatccttgttgcaatttcatttttctggggaattaactcagcagatcctaaggacccttcatttaattcatttgcagctgtattaaaaggaattggcggagataatgcgcttgccttaatcgttgctgttttagccggatttatagcaatgagtattgcagatcgtccaggttttgcgccaggtatggtcggtggatttatggcgtcggcagcaggtgcaggattcttaggcggactaattgccggtttccttgcaggttatgtcgttgtgctacttaaaaaagtattcacattcgtaccgcagtcactcgacggaattaaaccggttctgctgtatccattgttcggtattttcttcacaggcatcatcatgcattacattgttaacacaccggtaaaaatggtgatggatggattaactcactggcttgaaactttaggtactggaaaccttgtcttaatgggcattattttggcaggtatgatggcgattgatatggggggcccaattaacaaagcggcttacacattcggtcttgcgatgattgctgctggaaactatgcaccgcatgctgccattatggcaggcggaatggtaccaccattaggtattgcacttgctacaacaatctttagaaataaattctcaaaacgtgaccgagaagcagggattacatgctacttcatgggagctgccttcatcactgaaggggcgatcccgtttgcagcggctgaccctctgcgcgtaattccttcagctgtcattggagcagccgtggctggcggattaacggaattctttagagtcacgcttcctgcgccgcacggcggactattcgttttctgggtaacaaatcatccggttctttatatcatcagcatcttaatcggtgccgttgtaacagcgattttactgggtattttgaaaaaaccagtcaaactagaagcgtaattcagaagagaagcatcgtgaagagcgatgcttctttttgtttaatcatgaacaaattaggaaaaaatatctaattgaatggttgtcttgtgaatttttaaatgacatgtgataaagtaaagttattcaattcacgtttcaagtcttttagcagaaagtcttaggaggaagcagtattttgaacgaagaaaacaaacaaaacgaaaatgatattcaatctgatgcaaagcaagacaaaacagagaagaaaagttcactgtttgaatggatcaaagccattttaattgcacttgcgctcgtcctgctcatccgtacgtttatatttgagccgtatgtggtggaaggagagtcaatggaaccgactcttcatgatggggaaaagctgtttgtcaacaaaaccattaactatctaggtggtgtcaaacgaggtgacatcgtgattattaatggaaaagatggccagaagattcattatgtaaaacgattgatcggccttccgggagacacgattgaaatgaaggatgatacgctttacattaatggtaaaaaagttgatgagccttatttaaaagagaacaaggcacatgcgaaagagtatgaagtgcatttaacgggggattttggtccagtgaaagtaccgaaaaacgattactttgtgatgggggacaacagactcaattccatggacagcagaaatggacttggactcattgaaaaggatcgggttgtcgggacatcagaatttgttttcttcccatttggcgacattcggcaaacaaaataaaagcacccttctcaggtgtgtgagaaaagtgcttgaatggacgaccctttaaaagaagggtcgttttaatttggcgtgagcaccgtaacaatgatcacaatcgccaacacagaagcgaagacagacccagtaatggctaaaacggaccgaaacaatccgaccttttgattttctttccctcgcttttgtaaaaagcgtttcgaaaagatgtgtaccagtgtgtaaataagcacaagcccaatataaaggccaaaatccctcgcattaaagcctgttgcagataaataaatacccataaagaaaatcaataaacagtattccataagtgtaagtaatctcaaatcgcacgaactccttcaataaatcattcccatttattataccataatggacaaattgccttcgttcttagcgagagacgtttctatcaaacgttattcatgttatacttcataatgatgaatgagtgatggaggattaataaatgattgcagtaaataatgttagtttgcgttttgctgatcgtaaactatttgaagaagtaaatattaaattcactcctggcaactgctacggtctaattggtgccaatggagctggtaaatcaacgtttctaaagattctttcaggtgaaattgaagctcagacgggcgatgttcatatgagccctggtgagcgtttagcgattttaaaacagaaccattttgaatacgaagaatttgaagtattaaaagtcgtcatgatgggtcacaaacgtctatatgatgtgatgcaggagaaagatgcgatctatatgaaacctgatttctcagatgaagacgggattcgtgcagcagagcttgaaggtgagttcgctgagttaaacggctgggaagcagaaagtgaagcagcgatcttattaaaaggtcttggcattccagagagccttcaatcgaagaaaatgtctgagcttggtggttctgaaaaggtaaaagtactactagcccaagctttatttggtaagcctgacgttcttcttcttgatgagccaacgaaccacttggacttacaagcaatccagtggctggaagagttcctcattaattttgaaaataccgtgattgtcgtttcgcatgaccgtcatttcttaaacaaagtatgtacacatattgcggacctagactttggaaaaattcaagtatatgtcggtaactatgatttctggtatgagtccagccagctagcgctgaagctcagccaagatgcgaataagaaaaaagaagaacaaattaagcagcttcaagagttcgttgcccggttcagtgcgaacgcttctaaatcgaagcaagcgacctcaagaaagaaattgcttgataaaatctctttagacgacattaagccatcttcacgtaaatatccgtacgttcattttgcgccagagcgcgaaattggaaatgatgtccttcaagtagaaggtctatcgaaaacaattgatggtgtgaaagtacttgataacgtcagctttatcatgaatcgcgaggataaaattgcgttcttaagccgtaatgagcttgctgtatccactttatttaaaattcttgctggtgagatggagccagacagcgggacgtttaaatggggcgttacaacatctcaagcctttttcccgaaagacaatagtgaatactttgaaggaaacgatgtcgatctagtggattggcttcgtcaatattctcctattgatcaaagtgaaagcttcttacgcgggttcttaggacgtatgcttttctctggggaagaagtaaagaaaaaagcaagcgtcttatcaggaggagagaaggttcgttgtatgttatcgaaaatgatgctgtcaggagcgaatgttctgctgctggatgagccgacgaaccacttggatctagaatccattacagcgctgaataacggtttaatgagctttaaaggagctatgctcttctcatctcatgaccatcagtttgttgaaacagtggcaaaccgtatcatcgaagtgacgccaaatggcatcgtcgataaacaaacaacatatgatgagttcttatcagatcaagacattcaaaagagactcgatgagctttatgcataaataagcaaagacatccaaaagtggatgtctcagcgtgtagacaaaccctcgcattcgttgtcagtcctgcgtgccggtgctcacgaatgtcaaattcgctccgctccggtactcgtccttcctagactgcaaaggttttctatcacgctgaaaagaagacaaaaggctaaaatgaagatcattttagccctttgtcaacaatctgagacatccataagtggatgtctttttttcgattaaatcgcccagtttccattacggaagatcggttcgcgtttcccgtcttttgtaatcccgtcaatattcatttcctttgaaccaatcatgaaatcgacgtgtgtaatactgttgttcacaccagctgcatccaattcttcacgattcatctcttttccgccttcgatattgaacgcatacccgctgccgatggcaaggtggttcgatgcattttcatcataaagggtattgtaatagagaatattcgagtttgagattggtgaatcgtctggtacgagagcaacctcacctagataatgggagccttcatctgtttcaacgagcgaagttaaaatgtcttcgccttccttcgctttcacattgacaatccgaccattttcaaatattaatgtaaattcatcaatgatatttcctgcataactgagcggttttgtgcttgagacagtcccatttacaccgtcttttttaggtacggtaaatacttcttctgtcggcatgttggccatgaaagagacgccgcgctcactcacgctgccggcacctacccaaatgtgctgctctgggagctcaatcgttaaatctgtgccaggagcatcataatgaagcttgtggtagtggcgctcatttagtattttgaccttttcatttagtgactcatcgtgctttttccaagcctcaacaggatctgcttgatcagcgcgtgcgactttaaagatttgatcccataataaagcgacagcttcttcatctgtatggtcagggaaaatcttttttgcccattcttttgatgcagcgcctacgaccgtccaagcaactttgtctgattgaacgtattggcgatatgtatgaagggctgatcctgcggccttttgctgtgcagcgatttttttcgaatcaatgcctcgcagaaggtcagggctttctgacaagatcgtgataaaagcgccgccgcgttttgcgatggtttccatcatctgtgcttcccattctgggaattggtcaaacacatcctgcggtgcatgttcatattttaaacgggcaagaacaccatcactccagcggatatgtacgtttttcgccccgcgctcatacgcatgtttcgcgacaagacgaacaaggtctgcagattcagtagatgcagatacgacgacttcttgtcctttttgaacattcacaccgacttcaacaatggtcttagcatattgatctagttgtttttcaaatgaactcataaaaaccctcctttagtcatgttcatcatatcagatttaagaccgaaaaggaaaatggggagcatgcttaaagccaaaataaaaaagccgctttcgtgcggcttttttagcggttcagttgtttcacaggctgtgcattagaagggggcatatgtgaaaacgacaggctcattcctcctaaaataatacccgttaaaataactgtgacaacgactcgtttacctaaatcaagcaacatgttcttcctccttcacgtttatccatttctcacgatatgatcgaaatgataaaaaaagaagtagaacaagaagattattttaatgttttttgcaatttatgaatgacttctagtgaacgacctgttccgattgcgacagattcaagtggatttgctgcaatatgaactggaacgacaatctcctgtgagagccattcttgaatcccatttaacaaagcgccgccgccagttaagatcacgccgcggtctacaatgtcaccactaagctctggagggctgtcctctaatgtggcacgaatcgcctctaaaatatgaagaagtgattctcgcatggcaccttgaatttcatgagatttaagtgtgatcgtttttggaagacctgtcaccagatcacgtccacgtacttctaatgattccggctcatgctcaatgagaccataaccaatttccattttaacctgctcggctgtccgctcgccgattaatagattatatttctttcggacaaacgtaatgatatcttcatccagctgatctccgccaattcgaatggaatgacaagagacaacgccgccaaacgaaataattgcaacttccgttgttcctccgccaatatcgaccacgacgtttgcaacaggctcatctaccgggagatcagcgccgattgcggctgcaacaggttcttctattaaatgcacgtgctttgctccgcagtttttcacagcatcgctgatggcacggcgttcaacagctgttgaaccagaaggtgtacataccacgaccgttggttttctgaaggtaaacccgatatttttccctgcttttttcatgatttgtttgagtaaatctgttgtcatatcataatcagcgatgacaccgtctttcatcggacggatcgccacaattttaccaggtgttttcccaatcatttcttttgcttctgctccgactgcaagtacagtttttgtttctgtatcgactgccacgacggacggttcatttaaaataattcccttatttttactataaaccaatatgttagctgttcctaaatcaattccaatttcggcattttgaaacatgttttcacccaatctctatttttgctgttttaaacaattttacatttaaaagttcagagggttgatgtcatttgtgggggtttgtgatgaccttgaaatgaacttgtaaaattcaagtatcattttgacaatcacaataaattttccctttgttttttcttttatgaaaaaaatttttatagaggagaaaccttttgagaatctcttacgtctacgatatatcaattggtgcaaaacagattgatcttgagctaatgaaagaaagagggaacgaaattgaaatctatcggagtcgtaagaaaagtagacgaactagggcgtattgtgatgccaatcgaattaagaagagcacttgatattgctattaaagacagtatggaattttttatagatggggagaaaatcgtcttgaaaaaataccagccagagggcgtttgtctcatgactggtgagattacatcggagaaccatgattatggaaatggtcaaattacattaagcgctgaaggcgcagaactactgttaaaagagctgcaagaagctcttcagcagtaattaaaatagcctgctctcttcctttgtgctgagaacaggctatttttttctgaaaaagttccttaaaaatgccccatcaccctcaaaaaataagtggaaaatggtacaattgacaaagaatctcagggcggcaggtggaatcatttgaacaaaacatatcaagtgcggatcgtgttatctgttcttgcatttattttaatcttaagctgggatttcttttattatctaggcggctatcaaattaattggccgctcgatctagcctttacagtcttggttttaacagggatctgggttgtctcaggctatgtagaccgcttaaatctacttgtgtcagacttaaataagagagaaaaagaagcacacgaactgacagagcggctgaatcgaatcacagataacttgcaagaaatcgtctttgaaacaaacgagaaaggtgaaattattttcttaaatcaagcatggacacaaatgacaggctatgacatagatgaatgtctaggcaccatgtacaatcagtactttgatcaagaggagcgcgtggtccagcatttgttatctgtgatcaaggaacataagggtgcggggcgggtagaactgcagcttctccataaagagggaaagaaggtatggggagacgttcattacaagctctattttgatgagcatcaccagtttaccggagggattgggacggttgctgatattacgaaacaaaagcaggcaaagcttgagcttgaaagatccaatcagcaattgcaaatgcaggcgcaaaagctggctgttgctggacaaatagctgctgggatcgcccatgaagtcagaaatccactgacatcagtaaatggctttttgcagctgatgaagacacaatatcctgaaagaaccgattattttgacattatcttttccgaaattaaacggattgattttgttttaagtgagctgcttgtattggctaagcctcaagcggtccattttcaagaagtccagcttcatgagctcctagaacaggtgattaccttattaaaaacaaatgcagttctttcaaatattgatctcaaacagccatttaaaaagcaggatgccggtgctatcctagcagacgctaatcaaatgaagcagctgttcattaatttaattaaaaatgccattgaggcaatgcctgaaggtggcagcatatacatatctacagaaaaagtattgaatgaatggaagattaccattcaagatgaaggaaaagggatgtctgaagaggatattcaaaaaatatatgatcctttcttttccacgaaaaaagaagggacagggcttggtttgaccatctgtgcgacgattttaaaagatcatcacggaagaatggacgtatccagtgagcttggaaaaggcgcagcttttcaaatctatttgcctgtgtgtcaaaaaagcaggcagcagcaagttgagaggacgtgatgtcatgacgatgaaagctttatttgtatatgggacgctattgctgcatgaagagcaccacgaagcgtacatgaaggaaagcaggcttttagctaaatcagcttggatgagtggaaggatctatgatacaggtcaaggatacccagcgtgcgttcccgcagaaaaaggcactgtatacggggaattgtacgaggtgaccgctgatgcgttgaataagatagacgtactagaggaagggtatgacaagcaggaaattaatgtcatgacggatcaaggtcaggtagaggccatgacatacactttgccagagcagaagacatcagctctgaaagaaataaagagagggtgctggaaagcttatagactgtggcagcagaagccgtcatccttctattattttgcctatggctcctgtatggacgatgctagatttaagctggcagaagtcgatcatcacttcaaacaaatcatcggcggcggtgtactaaacggttttaccacgagatttacattggtgaggcctgatggatcaagggctgatatggtagaagacggcggcgaaacagagggtgttttatatgaggttccttttgatgccattcgttatttgtataaacgagaaggagtatatgagggcacatatcgtccggcttatgtcgatgtcaaaataggtgatcaaatttatgaggactgtttaacctttcttgtgcttcaaaagagcgaagaaatcgctccgccagctcattatcgcagtgaaatcgaaaaaggagcagacctctacttaagtgaagcgttccgcaaaaaaattcgttcgcatatggattcattaatcaaaccgtagtaaaatacatgataagtgaaataaaaggagtctgaacatgaaaaaggaatatgcagtcattggtcttggacgctttggcggaagtatttgcaaggcgctgagcgaagaaggacttgaagtcatggccatggatatgaatgaagatcgagtgaacgaatacgcgaaaattgcctcacacgcggtcattggcgattcgaccgacgaatccgttttaaaaaatcttggtattcgtaattttgatcatgtcatcgttgcaattggcgaaaacattcaggcaagtattttaacaacgattatgctgaaagagcttggcgtcaaaatggtcaccgtgaaagcgcaaaatgactaccatgaaaaggtgctcaacaaaattggagcggatcgcatcgttcatccagagcgagatatgggcagacggattgcacataaaattatttcaaataacgtgctcgattacctcgagctgtcagatgagtacagcctgattgagattgttgcaaacaacaggcttgcggggcattctcttttagatcttgatattcgggcaagatacggcatcaacattgtggcgattaagcgcggaaaagaagtcatcgtttcccctctggcagatgaaatgattcaaaaagaagatatcctcattgtcataggggcagtagccgatataggacgctttgaaaaacgagaaatgcagaacgattattaaacactccgatgacggggtgtttttttatatgaatgtgtacatgacaggtggacattgagaaggaaatagacactgaaaagggttgctttgttcatgtataacctcaaaaatgagtcatcatatttttcgtgcaattatcactattcagaaataaaaaacagtgttttgatatggttgattttctctaaatgtcattgactgggcaaacagattcgtttacgataagaaacattatattgtttacttggaggaggcagtgtcgttggataaggagcttttcagacatcaaattgaggtagcagcaaagagaaaaaaagcagccctcgtgattaaacatgcgaaagtcatggatgtgtttaaccaggaatggatagacgctgatgtcgctgttgaaaatggacaaatagtcgggataggggagtacgagggagaacaggagctggatgcagcaggtcaaatgcttgtacctggttttattgatggccacgttcatatcgagtcttctatggttacccctgctgaattctccaaagctgtcgttccgcgcggtgtgacaactgtcgtaacagacccgcatgaaatcgccaatgtgtcaggtataacaggcatccgttttatgcttgaagaagcgagaaaagctgccttacatatttatttcatgctgccatcctgtgtaccggcagtcagttttgaacgatcaggtgctacattaaaagcgaaagatttaaagcccctttatcaagagaaggaagtgcttggtcttgctgaggtgatggactatgtcggtgtggagcaggcagaagaagatatgcttcaaaagctgcttgatgctcaaaacgagaataaactgattgatggccatctagcaggcttaacagaccgattaataaacgtttaccgcacggccaatgtccaaacagaccatgaggtgacaacagcacaggaagcccttgaacgtgtaaaacgaggcatgtatgtcatgctgagagagggatctgttgccaaaaacgtgaaaaacgttttacctgctgtgaatgagaagaatgcgagacgttttttcttttgtacagatgataaacatttagatgatttaatggcgcagggaagtattgatgagcaagtacggatgtccataaaagcaggcttagatccatttttagcctatcaaatgggaagcttaaatgccgcagagtgttttggtcttaaaacaaagggagccattgcaccaggctatgatgctgattttatgctcgtctcagaccttcatcatgtagacatctcaagcgtatttattgcgggagaattggttgcgcagcatggagtgtacaaaccgagtgtcgaaaagatcgcaccgagctcagcattattacaatctgttcatgcagtagacgttcaagagcaagatattgcactgcctatcacagacgatcaaaaaatgaatgtcatccgtattattccgaatcagcttgaaacaaaattagaacaagtcactccttcagaaacgaacggacaatttacaagtgatacagacagagatgtattaaaaatggtgcttgtcgaacgtcatcaaggtttatctgaaatgggggtagggattgtcagcggcttcggcatcaaacacggtgcgattgcaacaacggttgcacatgattcacataacttaattgcagttggcacaaatgatgccgatattattaaagcgattgaggcgttaaaagaagcaggcggcggtttgaccgttgtcaaagaaggccagtctcttcatacgctgccattaccgatctccggtttattgtcagatcagccggtacatctcgtcaatgaaagcctccatgaactccatgaagcactaaaagaaactggtttttccttagactttaatccgtttttgacgctgtccttcttggcacttccagtcattcctgatgtgaaaatgacgacaaagggcttgtttgatgtcagaagctttcagcacctcccaattcaatcataaaagaatgagaaactgcatgtataccttgtattatatgtgcggtttttttcaatgcttgatgaaaaaaagagacacagccagtcggctcgtgtctctttttgttattacacttccataataatcggtaagatcattgggcggcgtcttgttttttcataaaggaaaggtgcaagtgtgtccgtaatttcgttcttaatttccgaccactgagttgtcttacgttccattactttttcaagatgctttgaaatcaaatcttgtgcgtcgttgatgaggtctccagattctctcatgtagacaaagcctcttgagatgagatcaggaccagcagagattttgaattctttcatgtccatgctgacgaccacaatgacaagaccttcttctgaaagaatgcggcggtctcttaagacgatattcccgatatcgccaattccgcttccgtcgatatacacgttacctgatggaattttgccagcgacacttgcttcgtcaccttttagtgcaagaacttcaccgttatccatgataaagcagttttcctcaggaattccgcaatcattcgcaagtttaatatgcgttttttgcatgcggtattcaccgtgaatcggcataaagaattttggtttaattaaacggagcatcagcttttgttcttcttgtccgccgtgaccagatgtatgaatattattgagtgagccatgaatgacctcagcgccagcacgataaagctggttaatggtgcggcttacactaatattgttacccggaatcggtgaagatgagaagacaacagtgtctccaggattaatcgaaatctggcggtgagtgccgtttgcaatacgtgaaagagcagccatcggttcaccttggctcccagtacaaagaatggtcactttgtttgctggtagacggttgatttcattatgttcaataaacgtgtttttcggacatttaatgtagccaagatcttgtccaatatcaatggcagactccatactgcgtccaaacacagcaacttttcggccgttggcaacagcggactcaatgacttgctgaagtctgtgaatgtttgaagcaaacgtagcaaagatgatacgtccgtcgacttttctaaagatgtcatcaatgctttcgcctacgcgtctttcagacatcgtaaattctggaatttcactgtttgtactatcggataaaagacatagaacgccttctttcccgatttcagccatttttgttaagttggcaggctcgccaacaggcgtaaagtcaaacttgaaatcacctgtatgtacgatgttaccaggaggtgtcttcacgacaattccataagaatctggaatactgtgtgttgttctaaagaaagacacagctgtttttctaaatttaatggtatcttcttcttcaaaaatgtgaagttttgtttgtctcaagagaccgtgctcttccaatttattacgaagtaggccgattgcgagtttgccgccgtaaactggaatattcacttgcttgagaaggtaagggataccgccgatgtggtcttcatgtccgtgagtgatgaaaagacctttgattttatcttcgtttttaactaagtacgtatagtcagggatgacgtagtcaattccaagaagctcatcttcagggaacttaataccagcatcaattaaaatgatttcatcttgaaattgaacgccatacgtgtttttaccgatctcgcctaaaccgccgagcgcaaaaactgccgcctgatcgtttttaacaaatttcattcctctcatagctccaatactttaaaattttcactttctcgttcatagtctaaaaaagcaccgtctacaggctgaatgaattcaatgttgtagctatgttttttcaacttatcgcgtacgtctctttcagaaaccgcttcaacgtatagtgaatctgtgtgttctcttacaggtacctcagtagtacttgcctgaaaaaataccttatatatcatccaaatctctccttaaataccgtatgttacactcgctaattctattatattaaaaaaacgcgcataagaaaagtctctgagaaaaaaggaccttcggcaaatgtgcggaagatccttttaagcgatcgattttttacgaagcatgtccttccattgtcttctaattttcttgcgcagacgacgaagcatcacaggtcgcctcctttcggtttgaagtcagattagaccatgtattccgtgctctctttatacttgtattatatgacgattccattgaatgttacatggttatatgtgggaaataggcgttttcataggaagtggtttcgaaagagggaatctttctgtatgatgaaagggagtgggtatacataacaagagacaggagacgggatatgaataaaaaagtcatcttctttgatatcgacggtactttatatgatcatgataaaaaaatacctgaatcaacgaagcgagcggttcgcttattaaaagaaaaaggtcatcatctctttattgcatctgggcgttcgccttttttgattcagcctattttagaggaattagggcttgactcctttattgcttataacggtcagtatgtcatgtatgagggagaggtcatttacggcaatccgctgaaactggagctgatggagcaaatttatgaaacggcggatcgtcatgatcatccgcttgtttttatgggggaaaaaacgatgaaggcttctgtgccaaatcatccgtttatccatgaggggattgggactttaaaaacagagcatcctgagcatgatttgtcttactttaaagaaaacgagatttttcaaatgctgttattctgtaaggctgaagaggaagtccaatacgaggcgttccgcgaagaaattgatcttgtcagatggcacgagctgtcaacagatgtcctgccaaaaggcgggtcgaaggctgaaggcattaaacgagtcatcgaaaggctgccttatgatcaaaaggataccgttgcctttggagacggtctgaacgatcgagagatgatttcatttgctggaactggcgttgccatgggtaatgctgtgaatgaattaaaagatttggctgattttgtgacaaagccagtagatgaagacggcatattccatgcagtgactcatctaggcctcattgaagagtaaaaaaagaagacccttaggctaatgggtcttctttttattttatgatctgccgatcgcaacagagttgtctggctcagcgaagggctgatccttttgaatatgatcataaaacataatgccgtttaaatggtcgatttcatgctgaaaaacaatggccgggaacccttttaggcgaatatcaatgtcttctccttcaagcgttgtggccttcaccctgatcttttgatatcgagggacaaatccaggaatggcttcatcaacagataagcagccttcaccagttgctaaataagctcttttgaccgagtgactgacaatgcgcgggttgaaaagggcatagctgtattcctctccatcttcgtcctcacagtgaacagcgatcatccgtttactgatattaatttgcggagctgctagtccaacgccgggtctgagtccatacttttcagccatgtcagcatcctgactatttttgacgaattcaatcatgtcagctaattgctgtttttcctcttctgtcggcgggagctcgaccgcttcagctgtttgtcttaatacgggatgtccgtcccgtacgatatcttccatggtaatcacaaatcttcactcctatttcctttgtatgtaaagtatataaaatgatacacaacatatgcaatgaaataaagaagaccggtcctatgagaccggtcagaggcttaaacagccattagcagcagccgccaccgccgcctaagaatgctgcgccaacgatgattaataggatgaaaaggacaacgattaaagcgaatgtccgtcctccgccgtatccgtagccaccgccataacttgggtaacaacagccaccgccatatccaccaccgtatccatacccgtgaccgccgtatccaccatacatacttccatgactataattagacatacttttgacctcctttggaaatacactcggcctctcataagtgaaggcgaagcgtgtaatataaactatgtatgaatgcactatttgtatagtcatgcgcctatcacttgaaaaaaatcttctccggctcatcaggatgacctctttccttgtcacaagcgcctataaaaattatagtggtatgtggagatgtaaagggggaaccttgtgatgagacagatgagaagaagcatgaaagcatgtgctgctttagcggggatatgtacccttttgctggcgggatgcggaggtcaaagtccatttcatgacatgcaagatgcgatgacgaaaatgagcgaaaaagaggcatcctttgaaaaagagcaaggtacactgcaaagctatgagaaaaaagagcagcagctctatacaaaaatgattcaaaccacaaaagatcatacaaaaacagtgtcaagcctttctgatcaggcgttagcatctgcagcgaaacgaaaagaacatttaaaaacagaaaaagacagcatggatgaatcgaaaaaagaattgaaaacggtaaaggaatctgccggacgtataaaagatacggatttaaaagaaaaagcagatgaaacggtcaaatcgcttgagaaaagatatgcgtcgtatgaccagctttacaaggaatatcaaaaggcgctgaaacaagatcagcatttgtatcaatctttaaagaagaaggacttaggatatgaagagttgaaatccaagctgaagacggtgaaccgttcttatagcaaagtcagaaaagaaggtaagaagttcaatcaatatacaaagcaattgaatgagcataaacaggctttgtctaaagcggcagatcaagagtcccaaaagagctgaaaaaacagctctttttttatttttcgacaaaaacaaacattttctattgtagtacagtagtacaatctatactagtacagttcgaggtgtttgttaaacagattgatacagctcactataaaaagtaaagcgaatacatttatttaaataaagccgttaaatcaattgacggactatttttcttgttgtaaactagtccttgttaacagaagttgtattagttttttgtgaactatcgttaatacagttagaagaactcaaaaacgagcgatcatctaatgtttcgacaacgatcctagtggctattaaatacaggagtcatatgagtattttgggttatcctatatctgtatgtataaatggattcacgacaaattgactgttaaaagaaaggaagaggtgactttagaatggctgcaaaaacaaaaaaagcaattgttgatagcaaaaagcaatttgatgccatcaaaaagcagtttgaaacgtttcaaattttaaacgaaaaaggcgaagtcgtaaacgaagcggcaatgccggatctctcagatgaccaattaaaagaattaatgcgccgtatggtgtttacacgtgtattagatcaacgttcaatttcattgaaccgtcaaggacgtcttggcttctatgcgcctacagctggacaagaggcttctcagcttgcaactcactttgcacttgagaaagaagatttcattcttccaggatatcgtgatgtaccacaattaatctggcatggccttccattaacaaaagcgttcttgttctctcgtggacactttgttggtaaccaaatgcctgaagatgtgaatgcactttctccacaaatcatcatcggtgcacaaatcattcaagctgctggtgtagctcttggtttgaaaaagcgcggtaaaaatgctgttgcaatcacttacactggtgatggcggagcttcacaaggtgatttctacgaaggtatcaactttgcaggggcttacaaagcgccagcgatttttgttgtccaaaacaacagatatgcaatctctacacctgttgaaaagcaatctgctgcacaaacaattgcacaaaaagcagctgcagctggtatcgtaggcgtacaagttgacggtatggatgcattagctgtatatgcagcaactgctgaagctcgtgagcgtgctgtaaatggcgaaggtccaacattaatcgaaactcttacattccgttacggtccacatacaatggctggtgacgatccaacaagatatcgtacaaaagaagatgaaaatgagtgggagcaaaaagatccattggtacgctaccgcagattcttggaaaacaaaggcctatggtctgaagaagaagagaataaagtcatcgaagatgcaaaagaacaaatcaaacaagcgatcaaagaagctgacgaacagcctaagcaaaaagtcactgacttgattgaaaacatgtacgatgtgaaaccattcaacttagttgaacagcttgaaatttacaaacagaaggagtcgaagtaagccatggcgcaaatgacaatgattcaagcgatcactgatgcgttacgcacagaactgaaaaatgacgaaaacgttctcgttttcggagaagacgttggtaaaaacggcggcgtattccgtgcgactgaaggattgcaaaaagagtttggtgaggatcgtgtattcgatactccacttgctgaatctggtattggcggtcttgcaattggccttggactacaagaattccgcccagtaatggaaattcaattcttcggattcgtttacgaagtattagattctgtttctggacaaatggctcgtatgcgctaccgttctggcggacgctggcattctccagtgacaatccgttctccattcggtggaggggttcatactcctgagcttcatgctgacagcttagaaggtcttatcgcacaacagcctggtatcaaggttgtcattccttcaacaccttacgatgcaaaaggactattaatttctgcaatccgcgacaacgatccggttgtgtttcttgagcatatgaaactttatcgctctttccgtcaggaagttcctgaagaagagtacacaattgaaatcggtaaagctgacgtgaaacgtgaaggttctgacctttcaatcatcacttatggtgcaatggttcacgaatcacttaaagctgctgaagaacttgaaaaagaaggcgtttctgctgaagtgatcgaccttcgtacagtaagcccgcttgatattgaaacaatcatcgcttctgttgaaaaaacaggtcgtgcgatcgttgttcaagaagcacaaaaacaagctggtattgctgcaaacgtagtagctgaaatcaatgacagagcaatccttagcctagaagcaccagtacttcgtgtagctgcacctgatactgtatttgctttctctcaagctgagagcgtatggcttccaaaccataaagacgtgcttgaaacagctaagaaagttcttgaattttaattaaatgacagaggggaaaagaatttatttctcttcccctttatcaattacaagaccgtgtaaacatacacaacaaggattcaacaaaatctaggaggcgaaaaacagtggcatttgaatttaaacttccggacatcggagaaggtatccacgaaggtgagatcgttaagtggtttgttaaaccaaacgacgaaattaatgaagatgacgttttagcagaggtacaaaacgataaagcagttgtagaaattccttcacctgttaaaggaaaagtattagaattaaaagttgaagagggaacagttgcaactgtaggacaaacaatcattacgtttgatgcacctggttacgaaaatcttcaatttaaaggcagcgaagaagaaggcgaagcaaaaactgaagctcaagtacaaggtactgctgaagctggtaacgagccagagaagaaagaagtggcacaagaagaagcggcagcagcaactggtgcaggcgcacaagagcaagtagatgctgatccaaacaaacgcgtcatcgctatgccatctgtacgtaaatatgctcgcgaaaaaggcgttgaaatttacaaagttgcaggttctggtaaaaacggccgtgtgttaaaagaagatatcgacagcttcgttaatggtggttctgcagctcaagaagcagcacctcaagcagctgaaagtgcgaaagaagaagcagctccaaaagcggcagcagctccagttcttgaaggagaattcccagaaactcgcgagaaaatgagcggcatccgcaaagcgatcgcgaaagcaatggtgaactctaagcatacagctcctcacgtaacattaatggatgaagttgatgtaacgaaccttgttgcacatcgtaaacaattcaaacaagttgcagctgatcaaggaatcaagttaacttacttgccttacgttgtaaaagctctaacttctgctttgaaaaagtacccagtacttaacacttctatcgatgataaaacagatgaagttgttcaaaagcattactacaacatcggaattgcagctgacactgaaaaaggcctgctcgttccagttgtgaaaaatgcagatcgcaaagcaattttcgaagtgtctaacgaaatcaatgagcttgcaacaaaagcacgtgatggtaaactggctccagctgaaatgaaaggtgcatcttgcacaatcacaaacatcggttctgctggtggacaatggtttactccagtcatcaaccacccagaagtagcgatccttggtattggccgtatcgctgaaaaagcggttgttcgtgatggcgaaatcgttgcagctccagtcttagctctttccctaagctttgaccaccgtatgatcgacggagctactgcgcaaaatgcccttaaccacatcaagcgtttattgaatgatccacaattaattttaatggaggcgtaatgtcatggtagtaggagatttcccaatcgaaacagatactcttgtcatcggtgcaggtcctggtggatatgtagctgctattcgtgctgcacagcttggacaaaaagtaacaatcgttgaaaaaggaacacttggcggtgtatgtctaaacgttggctgtattccttcaaaagcattaatcaatgctggccatcgtttcgaaaatgctaagcattctgaagacatgggtatcaaagctgaaaacgtaacagttgatttcacaaaagttcaagagtggaaagcttctgttgttaacaaattaacaggtggagttcaaggtcttcttaaaggaaataaagtagacatcgttaaaggtgaagcttatttcgtagacagcaactctgtacgtgtaatggatgaaaattcagcacagacttacactttcaaaaatgcaattcttgcaactggatctcgtccaattgaattgcctacttttaaatacacagaccgcgtgatcaactcaactggtgctttggcgcttaaagaagtacctaaaaagttagttgttatcggtggtggatatatcggtactgagcttggaactgcttatgcaaactttggaacagaagttgtcatccttgaaggtggagacgaaatccttccaggtttcgaaaagcaaatgagctcattggttaaacgtaacctgaagaaaaaaggaaacgttgaaatccatacaaacgctcttgcaaaaggcgttgaagaaaaatctgatggtgtcactgttactttcgaagtaaaaggtgaagaaaaaacagttgatgctgattacgtacttgttacagttggtcgtcgtccaaacacggatgagcttggtcttgagcaagttggtgttgaattgactgatcgcggagttgtcaaaacagacaaacaatgccgtacaagcgtaactaacatctatgcaattggtgacatcgttgatggaccaccacttgcacacaaagcttcttacgaaggtaaaattgcagctgaagcaatcgctggagagccagctgaaattgattaccttggtattcctgctgttgtattctctgagccagaacttgcaactgttgggtacactgaagcagaagcaaaagaagaaggaatcgaaatcgttgcagcgaaattcccattcgcagcgaacggacgtgcactttctcttgatgcaactgatggcttcatgaaaatgatcactcgtaaagaggatggtcttgttatcggtgcacaaatcgcaggtgttggcgcttctgatatgatttcagagcttagccttgcaatcgaagctggagtgactgctgaagatatcgcaatgacaattcacgctcatccaactttaggtgaaattacaatggaaacggctgaagtagcaattggaagcccaattcatatcgtaaaataatgaacctattaaaaccctctccttgatggagagggtttttttgagcgctcccatatgaaaaatccctcatgagatgaggggctttttcatatggatatataagtgcaagggtaggccattaatttgtattcacgcggtctaaagcgtggcacaagggcgataaaatatcctctttgctgctgacatttccttcaaccttcacaatgactttttcattatttacaagtaaaatagccggcaattcgtctacttcatttttccagcctttacgatcttctttcacaatcatctttgacatttccttcggatattcattctttaaatcgaggactgcatcataataaggactttctttatcaagattttctgcatctgtaaaaaagagaattcttggtttctgaatatgactgacttggtcggtctgattcggtatgatatacgcaaatgagcatgaactaagtacaaagagcatggggaatataatgagaagtgacctcataaaattcaatctattcacctcaaaatcctttggggttgtcccaacatttttaggagctggttacctgttagtcactctagtgtatcatgtcctttttgacaattttcgattgttactcaattgttacagaattgatatgaagcaaaatacaattgaaacgttccctcaatatgatgagaaaaaagcatatattcataaaaaatatttaaatgtgtcatacaattaaccgttgacaacttaaatgtgacatcatattatagagatatgaaatagattaaacgctttcaaattatgaatgaagaaaaggggaatgtacgtgggtacaattatttgtcaagattgcaatgaaaccattgatcaatttgaaaatgaaaaagtgacaacgctatacggaacgtgtggtcactgtcattgctgtgatgaagcctctgaataaataaaaaagcatgcagctccatttggggctgcatgtttcttttttataaaattggtttttgttctttaatcacgcggatcatttcaagcgttgaatcttctggtccttggacagggagaccaatttcaatgtttttaaagatatatgagatattttcttctgtgataatttctcctggtataaaaataggaatgcctggcgggtacaccataacaaactctgcgatgatgcggcccgctgcttctttaaacggaaccacttctgttgtggcgtaaaaggcgtcacggggcgtcatggcaagcgatggaatctcaggcagcaggacttctgtgaccgcttgtgtgccgctctcacttgtagaggttgcggcaatttccttcatagccgttataagcgtatcgattgtttcatcagaatcaccaggtgtcacaatacataaaatgttgtaaaggtcagagagctccacttcaatccggtagctttctctcagccatttttcgacatcatggccatttagcccaaggtctttaattgagataattaatttcgttgggtcataatcgtacgtagaagctgaaccgagtatttccttgccaatacacgtaatgccatcaattcggttcaaacggtttctcgctgattcagccaaacggatggcttcatctgcaagtgcctttccttcagtggctaatcgctttcgagcgacatcaagtgacgccaagagcaaataagaagtagacgttgtcgtcagcatgctcaaaatcgattgtacgcgatcttttgagacaagcccttccttcatatttaaaatagagctctgggtaagggaaccgccgagtttatggacactcgttgctgccatgtcggcacctgcctgcatcgcagatagtggaagctcatcgtgaaaatgaatatgcacgccgtgtgcttcatcgacaaggacaggcacatgaaatgaatgggcaatgtctacaatcgattttaagtctgctgaaaccccaaaatacgtcggattaatcacaagcagaccttttgcatctgggtgctccgtgagcgcctttttcgctgattctggtgtaatgccgtgagagatgccaagttctttgtctatttctgggtgaataaaaacaggaactgcgccagaaaatacaatggcggacataatcgatttatggacgttgcgcggaatgatgattttatctccaggtccgcatacggtcatcaccattgtcatgatggcgccgcttgttccttgaatagagaaaaatgtatggtcagcaccgaatgcttcagcagcgagctcctgtgcttcttttatcatccctcgaggtgaatgtaaatcatcgagaggttctatattaatgagatcaatgcttaatgcattgtcgccaatgaatgctctgaattcagggtccatcccggctccctttttatggcctggaatgtgaaattggactggattggttgcagcatgcttttttagtccagtgtataagggtgtatcatgttgtgacaattgctttcccaccttcattgaaatacctgctattattgtgccaataatggcagatttcattgcataaaacaaaagaattatattatgaactgatcggaatgtaaagcataaaatcaatcggtttctgatcgaacagatgctataataaaagttcaaataagaaatgagtgttaaagtgagggacaagtaaatggaatatcaatatccaatggatgtcgactggacgacagaggaaaagattgccgttatttcgttttttcaagctgttgaaaaagcctatgaaaaaggaattgcgaagcaggagttattagatacttataaacgatttaaagaggttgtgccatcaaaagcagaggaaaagacgcattgtgcagcgtttgaaaaggaaagcgggtattctccttatcgtacagtgaaatctgcaagagaggcagaagagacagccgttatacgtatgtaagaaaaaacgagcctgcatgggctcgtttcagcgtgtagacaaaccctcgcattcggtgtcagtcctgcgtgccggtgctcccgaatgtcaaattcgctccgctccggtactcgtccttcctagactgcaaaggttttctatcacgctgaaaagaagacaaaaggctaaaatgaagatcattttagccttttgtcaacaatcagaaacgagccgcatgggctcgttttttttatacagattctttttgtgtaaagcggtatagataagtcaacgtgcggaaggcatcttcgatttttgataagtattcttcattattcatttgaacgacttcttctctaggcagctgaatgccgcaaaggagttcagcttttttcaccgtttggacacgttcaaacagcgttttcagctgttctgcatcaagctcgctgtgacgcatgacatctggtttcatatgatctttagaccaaacaaaatcttgtggtattttcttctgaatggtatctagttctttttcgaacagctgaccatactcgcctttcacaggagattcataaatgagcgcaaaccatacaaagacatgtgttttccacagcccaatttgaaaatgagggagttttttatacccacgcttgctgtttgcaaaagcaacccacgtatcatttggcggattgactgatcttctagcatgctttgcgacatgtacaaacatttcgtctcctgtaatagaagaaagaagtggtgcaaagtgttcaccaagtgcctcgagctttggacggactctttcttttaatacggtcattcgttcatctaaaccgtcaactgtaaatgtctcaaaatcttcatctctaaaacgcatttcactcatattatgcctcctgtattctttagctgatcatattttatcatagcttgggtcaagctcaaaaaaagatgcactgtcagatcaaagattgtagaggaagtaggacagcgtttaaaaacaacgattttgtggtacataataaataggtaaagacacaatttttagaatgtcgttgcggttatgcgatcgcttcatacgatataagcaagaaccaattctcttatcgattgaattttttatcaatgaaaactgacaaggaatgaatcattctctggaaggggcgttgaccaaatgaagcaaatcgtgaagcaggggtatagacaggagaagaagaatcgcatcgctgtgtggagattagaggtggattatgagctttctacgcttcatgaagccatcgagcaaaaagatgacatccaaatcgaacgcagcaaacgaaagcttgagcgcctaagaaaagaatgggagcagcttaaagggtaaaacaaggtgaggtaaaaacgaaccaattcatcggttcgtttttgtatgaagctgcttttttcttgcttttacgtacataatatcagtatgctaatacaaataggtattacatagaaaagaggtttacagtctgatgacaaactgggtggaaattgaccgtcttgcaaagctttgggtaaaagaagcaggaagccgtattaaagcgtccatgcaggaaggtctatcaattgaaacaaaatcaaatccaaatgatcttgtcactaatattgataaagaaacagaacgttttttcattggaaagatacaatcgacattttcagatcatcacattttaggagaagagggacaaggggaagaggtgacctcgctggatgggattgtgtggatcattgatccaatcgatggcacaatgaactttgtccatcaaaaacgcaactttgccatttccatcgggatatttgaaaatggcatagggaaaatcggtctcatttatgacgtcattcatgacgagctttaccatgcggtcaaaggggaaggggcctatatgaatgataccctgcttccgccattaaaagatgtagcgattgaaaaagccattgtcggcattaacccgacctgggcgatcgaaagcccttattttgatgctaaaccgtttgcccgtctcgtgcgtgatgtgagagggacgagaacgattggatcagctgcccttgagctcgcttatatcgcaagcggcagaagtgacgcatacgtcacgttaaggcttgcgccgtgggattatgcagcaggctgtgtgattctagatgaagtaggggctgtctactcaaatatacatggagaacgcctaacttttctagagaaaaacagtatagtcgccggaaatcgatccgtttgtgaaaagattttacacgattacataaaaggcagaggaaataaaaaataaaccaaatcacttcatgagaatgaagtgattttttgtgtttgatgaaactttttggtaggagaaatgtctatacgaacgaggccttaatttgatgtaaaggattgtgttttaatgttagatttgtttagtgatttatccctccattttgaaagatattttattttaaatgagtacagtatccacatcattcaatggtgtgtacttggactatttgtcctttttattacactgcctatatggaaagaaaagaaaagtgattatgtattttatgctgggcttgtattaagagtagtcctgctaggcggaatgacacttgaaatgagccaccaagtcctagccagacagtatacgattgaaacatttgaagtgctgacggatttcatgcaatttctcatctatgggtatgtcttgcttgcatcactttattatgtgatctctcttccttatttaaagaataaaggcatgttttttgcatttgatttatctgtcttgcttctgcctttatgtcagacagtgtttatcctttttgctgaaagtaaaaagttctttctcagcggtgatacagggctagtatggagagaccttatcactgtagtgatcatggttggctttgccgttttggtactgtacctttttttccgtttgttttggcagcagaagtggaaggaatcgctgttgttttatggcctgattttcgctgccctgctttatattttttatccttctatcacgaagtatgagcttcaatcttcatttaaatcgattgtgattttagctgcagcagcaggaagctttatgatgatttatttgttatgtgctttactacgagacaaggtgaggctaaggcagtggggtgctgggtgtatagctgtcttttttctactattactcaacccgatcgttaatatccctcataccatgttccaattcaccaaaacggaattggtcgatactttctcagaagaatatcgccctttatctgccataagtgcaaaagaacttgcttcaaaatttgtaccagctgatcagaaattatatttaaatgctagttctgagcctattccttatcaatatgtgtttgcagctgatcagtatgaagttaacatttctgcatttacgggcgaattgagcggttattcttatcgaggccgtgtagaggggaaggaactgaccgataaagaatatagaaaaaaaacaattgaattttttgaaagaagcggacggtcaatagatctcaatcgcattcaagtagttgtcaaaaaagagggcggggagacgagtgttcttcttctgccaaaagtaaaaatgtctcataacgagagtgaaagctttgcgtttgctacttggaaaaaggggacacttcgacaagcgcaatatggaaatgccatctttaaattaaaggatattgacggaatcaatataacggaaactgagataaaaaacacaataaacagtctgtatcaaaacttacatctaaagccgccagtttatcaaatcacaggtattgatgatttttatttggattggcagcatgaagtgaatgtgacaacaaatgatcaatcggagtttcggtttaatggctccacaaaagatgttatcaatttaaagctgtctaaatcgcttcttcaacagaaaaaaggggaaatcagcgatgagaatttgttaaagctcatagagaaaaagccagaagacgtgaagaaaaagacaggcactaatgaaaccaaacagtatacatttaaccgatcctctcatctactgcgtgtgtttagagatcatgatggaattgaactgaggctggaaccagtgtcctttataccggatgccgtatcgaataaagatcgtgatgaagtctatcaacaagtattgaaaagtgaaaaaccatctatgatttataaaaaacaaataaaaccagtcagaatgatcaacgaagaaggggacatggacatttcatggcttgtcatcattcaaaccttcggatcaaatgagcgtaaaatctatgaagtaaatggacgaacaaaagaggtgcaccgttttgacagataaagaaaaacaagccatctttcaagacttatatgaactgtatcaagaaggggagctgggtgacgaggcagccagctggatgaagacacatgaacagcaatttcagcatgttgtcatagggaatgaacagggttcagcgctgattgaagatcagaatgactataatgagttaaagcgcatgaaggggtttatttactcgttatacttctttttcattgtcttatcgatttggatgactgtgtggttttatttctaatgtccagaccagctgatcaaattgaaaaaatctatgaagaatattttcaggaaatcaccaaatatttatatcggcggacaggaaatatggaaacggccaaggatcttgcgcaggatgtttttatgaaggctttacatggattatcctcttttaaaggacactctagtatgaaaacatggctttataccattgcttatcatacatttgtgaatgactatcgccggaaaatcaaatggacatttacgaatgtagaagatgttgattacttagagcagcagtcctttatgacaccagaggaccacatcgaaacacaagctgacattcaaaggctgtggcatcatatcaatcagctgaaggattcataccgagaggtcctcattttaagagatattcaggaattgtcatatgaagaagtagctgaaattttgaattggactttatctaaagtcaaaacaacccttcatcgagccagattagagctgaagcgaatgctacattgtgaggagttcaataaatgagctgttatttgatcgaagaattgttaccactttatatagagggagacacaagtgcagaaaccaataaaataatagccgagcatctacaatcttgcgagagctgccggcaactttatcaagaaatgaaagaaccaatcactcttatacagacacctgatcggacgccatatataaatgaaaaggaagaaaaaagaaggttcgagaagcgctactatggcaagttaatattccgagcaagcatcgtgtttggtttagggtacgtcatgatgatcattctttattggctgaaataaaaaacccccatctgggcgaaccaggtggggggttttcgagcttagcttaatttttcttttgccatttgaactgcatcatagaacgtttttaattgctcttgaggaattttcttcagcatttggttgaaaacaagtaattcagtagagctgaatccaagaccttttgcaatttttgaatcaattacaacgtttccttttttgtctagaacaagtgcatcaccagcaagatcagcaagtctgatcactgatttgaaaagtttttcgaatttagctgcttcttctttcgtaagaccaagttcaacagcttttgctgcatcaaagatcaatttccctttttcgtttttagtgatgctttcactgaaaacgattgtaagaacagctgcgcgatctaagaatttctcagcagtcgccgcttcttcttcagttagtccgagctcaacagcttttttcacatcaaatgtgtagctgttgtcttcttcaacaaatgaattgatgagaatgttgatgacgcgctcgtttttctccaataattctttaatgatttgctgctgttcaaaaggaatccctttgaaagttgcagcacttgcttgcccaggagctactgttgtgaaagtaaggataatagctaaagcgaaaaatacaacagagctgagcgatttgctcaaaaacttcttcatgcttcttttctctcccttttctgttaaattttgttgcaagaacagcataccatgagaaactttgtggaagaataggaaaattgtaactttatgtttggttttggagaactataaacattattgtcgaaaaatgaagaggttcagattgcttacttttgccaattctatatgatatgttttgtctctacactcgagctttcataggtggttggtcttatttttactcaaaataaaaagccttctacatgtagaatgtaaaaggcttttgaggaattttatgattgcacgtttaattttctttttaatgtaaatcctgtacccatgaaaatcatggcgaacataatacttagacaaatacccagcacgtttttttctgcaagagataccccaataaacgccatactgacaactgcaagtaatgcacataataatagaagccatttgatttgtttcatttgtctccatccctttttttagagttaatataagtttacagaaaaacgatcggcatttaaaggggattgtgatataatatgaaagttatctaattattttaggagatgaaaatgtgaaacttcgaaaagatcttcgcaacatcgcaattattgcccatgttgaccatggtaaaacgacgcttgttgaccaattgctccatcaagctggtactttccgtgcgaatgaaaatatcgctgagagagccatggattcaaatgatttagagcgagagcgcggtattacgattttagctaaaaatactgcgatccattataaagatacacgcattaatattttagatacaccaggacacgccgatttcggtggtgaagttgagcgtatcatgaaaatggtagatggtgtacttctcgttgtggatgcttatgaaggctgtatgcctcaaacacgctttgtgctgaaaaaagcacttgagcaaaacttaacaccaatcgttgttgtcaacaaaattgaccgcgactttgctcgtccggctgaagtagtcgatgaagtaattgacttgttcattgaattggatgcaacagaagaacagcttgaattcccagttgtctatgcatcagcaatcaatggtacagcaagtaacgatgcgagcacgcaagatgaaaacatggaatctttgtttgaagccattgttaaccatatcccttgcccagttgataaccatgaagagccgcttcaattccaagtggcactacttgattacaatgattatgttggaagaatcgggatcggccgtgtcttcagaggaacaatgcaagtaggacagcaagtggccttaatgaaagttgacggcagtgtgaaacaattccgtgtgacaaagatttttggtttccaagggttaaaacgagtggaaatcaacgaagcgaaagcaggagatcttgttgctgtatcgggaatggaagacatcaacgtaggtgaaacggtttgtccggtagaacaccaagaggccctgccaatccttcgtattgatgagccgacacttcaaatgacgtttgttgtaaacaacagcccatttgcaggccgtgaaggaaaatacgtgacatcacgtaaaattgaagagcgcttagagcagcagcttcaaacagacgtcagtcttcgtgtggatccaactgattcacctgatgcttgggttgtatctggacgcggagagcttcacttatccattcttattgagaatatgagacgtgaaggatttgaattacaagtatcgaagccagaagttattgtaaaagaagttgatggtgttcgatgtgagcctgttgaacgcgttcaaattgatgtaccagaagagcacactggctctatcatggaatcaatgggcgcaagaaaaggtgaaatgattgacatgatcaataatggtaacggtcaagttcgcctgatctttacagtgccatcacgtggtttaatcggatatacaactgaatttctttcattaactcgtggttttggtattttaaaccatacgtttgacagctaccagccaatgcagtctggccaagttggcggacgccgtcaaggtgtacttgtttcaatggaaacaggtaaagcgactgcttacggaatccaaggcgttgaagagcgcggtgtgatcttcgttgagccgggtactgaagtataccaaggaatgattgttggtgagcataaccgtgagaacgatcttgttgtcaacgttagccgtatgaaacaacaaacaaacgtacgttcagcgacgaaagatcaaacggtgagcatgaagaaaccacgtattatgtcacttgaggaatctcttgagtacttgaatgaagacgaatactgtgaggttacacctgaatcgattcgtttaagaaagaaaattttagataaaaacgaacgtgagaaagcagcgaagaagaaaaagctagcaggattatcgtaattccatgaagaattaaaaagatagaaccctgaaagataaggggagggaatctttttgaatgatcaggaagtaagtgaaaatctatcctttttcgcgatgctgtttcgtgtcgatgaaaatccgcaaacagggatgtggctcctatatggaaccatccttgttttagcgattattgtttttaagctcggctttgctagacgtttaccgattttaaaagcactcgtgatttacttgtttttgatttttggctgcacgtttctcacatttctaggaatctttctgccagtagcggaaggcctagtcgtggcagctgccattttgattatttataaaatacggctgcatcgtgcaaaaaaagaaggaacagtgaatacgtaaaaaaaagacctgaacatgtgtcaggtcttttttatgtcttttgttctttttttccttttttcttctttttctctttcgtcgcaggatcttgataaagagagaatctgccagttttgatgcgtgcttctgtctttactttaatgcgttcctgacagtcatcgcacatatatgtatgaatcggtcgatttcttaaccgcttagcaacgagtgtatcatcatcaattgtttcaagcttctcacataatgagcacttcactctcatcattttcacctcacttattgcatttattatagcatgttttccaagcacttgaaatcagcgtagaaaaaggcttatatcacaggagatataagccgttctctttatttcttctgattcatatgatggtttgattgatcattttgatgtttgtctaactgcttttgatcgttttgtttgagctgatcatttggctcattcgtcgggtctttttcgtgacgatcgatttcatttctcggcatctctggcatcacgcggccgacaatggcagctagttcatccataatcccacttacaggacggcctgcttgtatttctttgcccatttcttttaaccggctgactgtatccggatcagcgactacaacagcattcgcaccttctgggtcatttttcagcgcttttgcaactgaatatttaatggtttctactttgcttctatctaaatcatcttttacatcaataccaacaacagcatagcggccgatgacgatcgccgttgcatcattgacatctgctacgttctctgtcactttgacaagatgctgcgcaacatctgtggatgaccgggcttgattggtctttttctttgttgagtctgacacccgtactacgtgctggcgtccatcttgcttgtccagtgcttctggcttttcctgctgctggcaagcgcccaacagaatgatggcttgaatcatgaataatgtcataaatagtcgcatctatattccctccttcacaaactgcatgatttattttattgttgaattaaccttctaactttattcatgaaaacatatattttaacaatcgttttgggaaagacaaggatgaatgaaaccccgatcaggaggcgaaggacctgagtaaaatttatgtattagacacaaatgtgttattacaggatccgaattcaatcttttcatttgaagacaacgaggtcgtcataccagccgttgtgttagaagaagtagactcgaaaaagagatatatggacgaggttgggcaaaatgcccggcgtgtctcacgcttaatcgacggtttaagatcgaaagggaaactgcatgaaaaaattacactagaatcaaaagggacgctgcgcattgaactgaatcaccgctccttccatgagcttcaagaaatttttattgaaaaaacgaacgataatcggattttggcagtcgcgaaaaatttgagcttagaggaagaaacaaaacctcatggccggcctgtcattttggtcagcaaggatgtgttagtgcgggtaaaggcagatgctatagggcttcaagcagaagacttcttaagtgaccgtgtcctgcaaaatgaagacatcgataatggctatcatgagctctacattccgactgagcaattgaatacattttataagcacaatcaattaccaataaaagaggtcacaagtgcaccatttaaccctcatcaatttgtcatcatgaagggaaatgaaggcggttctgctttaggaatgcttgatcaaaaggcagagcatatgaaacgtctcgtttatgatcaagagtatatttggggaatccgtccaaaaaatgtccagcagacgatggcactcgagctgcttttgcgccgtgacattccgctcgtgacgctgatcggaaaagcagggactggtaaaacattgcttgcacttgctgccggattaatgcagacagaggatctcggtatgtttaaaaagttgatcgtggcgcgctcaatcgtgcctgttgggaaagacttaggctacttgccaggagaaaaggaagaaaagctcagaccatggatgcagccgatctatgacaacctagagtttttatttaatacaaaaaaaccaggtgagcttgatgcgattttggcgggaattggatctattcaagtcgaagcattaacatatattcggggaagaagtatacctgatcaatttattatcattgatgaggcgcagaatttaacaaagcacgaggtgaaaacattattaacgcgagtcggagaaggaagtaaaattgtgctgatgggagatccagagcagattgatcatccttatttagacagcttaaataatgggcttacgtatgtgatcgagcggttcaaaggacagcaaatctctggacatgtcaagcttgtcaaaggagaaaggtctggacttgcacagcttgccgctgatttgctatagtccagaccctctgacttatgtaatcatcagctctttgacaccttttatcggctgagtgaggttggactgatccgcgaaatagacgtggattggtccttcttctgtgattggcttaccattttgactgaaatgagcaatgctctccattgcctgagaaagcggcacagcaattgtacctgtttctgtgacaaattcgcatgtatccgcatgttcaagcggctcagcattttttagcatatcgccaagcttcatcccgaagctgcctgtgacgagtctttccttttcgtacttcttctctgtttttaacgtgggtggaagtgtttgaccttctcttatgacccgctcttggtcaagctcctgatctagctgattctcttcactttctgcacttttttcaaagaatgaatccattaaaaatttacggtcatcaaaaatccatacacttggatcaatggtgatcttgtactgtacgttccccttgatttgaatgatgctcatgttcaagacaacccctttccaacataaattatagaagttttcccccgctttgtcactttcataaacatgcgtctccttgtacacactaatcttacatgaaagataggggaggatattaggcatggcatgtcgcgacaatgaagagcttcagcgatttgtagaagaagcaaaaaaagtggccaaagatggtcaagtagcatcctatattcccgctctcggcaaagcggatcagacggatttatctgtggctgtgtatcatgtgagtaatacgtgccactcggcaggagatgtagataaacggtttactcttcaaagcatttcaaaagtattagcacttgcgctcgtgctctcagaagaaggatcaaaaaaagtatttcaatttgttggacaagaaccaacaggtgacccgtttaattcgatgatcaaactggaaacagcaagtccgaataagccgctgaatccaatgattaatgcaggggcgctcgcagtcacgagtttaatcagaggagcgactccgcaagatcagctgagccgtttgcttggcttcattagagagcttgcaaatgacaaaagcattacatactgcaaagaaacagctgcctccgaatttgagacatccatgattaaccgggcgatgtgctattatatgaagcaatatcatattattagagggaacgtagaagaagtcatggacgtctatacgaaacaatgtgccatcatgatgaacagcttggatttggcgaaaattgcttgtgttttttcattagacggcagacatccagagacgggtaagcagattctttcgaaagatgtcgctagaatttgtaaaacctttatggtgacgtgcggcatgtacaatgcgagcggagaatttgccattaacatcggaattcctgcaaaaagtggtgtctcaggcggtattatgggggcggcaccatatgattttgggatcggtatcttcggtccagctctggatgaaaaagggaatagtattgctgggattaagctgcttgagctgatgagtgaaaaatacgagatgagtatcttttaatgcaggaaggcttctttttatttttacaaagcgaactgtacaaatctgcttgcaattttgggcgtttcgctttatgataaatagaagaattaggtactcgcctggggaacggagggatacttttggcgtcagaaattttagtcgatcatcggcaaaaagcactggctttattaaaattggatgcagataaaattttaaaattgatccaagtgcaaatggacaacttaacgatgccgcaatgtcctctttatgaagaggttttagatactcaaatgttcggattatcgagagaaattgattttgctgtccggcttggattagttgatcaacatgaaggtaagaaactactcgataaacttgagagagagctttccgcacttcatgatgcgttcacaaaaaaataatgattgaaaactcaaacttccacaacataagtttgagtttttttgtcctctattttcttttcattgattgatgtcaaacggacttgattctttcatgaatgacgaacaatataaaagaggtaaaacgagatcaaacggagaaaatgtagtagaataaaaacagctaagaggatatcaagcagtagaaacagacgttaggaagaggattatatgttaaagagaatgctaaaatcgtatgactactcattattgttcgccattattttaattagcgcattcggtttggtcatggtgtatagctcaagtatgattacatctgtgatcagatacgatgccgcaccagataatttttttaagaaacagcttttatttatgatcgttggagcggtcatcttgttctttacagcactagttccatatcagctgttttcaaataagaaattccagatcggtatgctgctgctatcagtgttttcactcatctatgtgtactttggcggtcatattgcagggaacgcaagaagctggatcaaaataggcccatttagtcttcagccagcggaatttgtgaagattgtcgtcattatctatcttgctgctgtgtatgcaaaaaagcagcattatattgatcatattttaagaggagtcacacctcccatcgtgattgtctcgatcttatgcggatttatcattttgcagccagactatgggacagcctttatcattggcatgattgctctcgcgatgattttatgctcagggtttagcgggaaaacacttgcgaagctgctggcgctatttagtgccgtgatggtcgtcgtgaccccatttattattcttttttgggataaaattttcacgcaaaatcgtctcgggcgttttgagagtttccaagatccatttaaagatgcaggggcgactggacatcaattgattaattcctattacgctattggatcaggcggcttttttggactgggtctaggagaaagcgttcaaaagtacggatatcttccagagccgcatacagattttatcatggcgatcatttcagaagagcttggctttttcggtgtattttttgttctcgctctccttggcttcatcgtcgtgaaaggtttttatattgcaagaaagtgtgaagatccatttggaagtttgcttgcaataggaatttcctccatgattgcgatccaaacatgcattaatttaggcggtgtttcaggtctgattccgattacaggggtcacacttccatttatcagctacgggggatcgtccatcattttacttagcggctgtatgggaatattgctgaatatcagcatgtttactgaatataaagagcgttacaaaaagaaaaaatcaatgagcaaaccatcagttcaaaaaaatggattgcagaaaactttgaatctttagaaaacaaaagtgtacagttttcatttcttcctttattatagagtacatataaaattttaagggatatggaggagtgagaaatgtcacagagaacaattcaaaaggttctagttgcaaacagaggggaaattgctatcagagtcttcagggcctgtacggagctcaatttacgtacagtggccatttattccaaagaagactcgggctcttatcatcgctataaagcagatgaagcatatctagttggagaagggaaaaaaccgattgatgcctaccttgatatcgaggggatcatcgaaattgcaaaacgaaatgacgtggatgcgatccatccaggttacggatttttatctgaaaatattcattttgcaagacgatgcgaagaggaaggcattcaatttatcggtccaacttctcagcatttagatatgtttggagataaagtaaaggcaagagatgaagcgaaaaaagctggaattccagtcattccaggaagtgacggaccagttgattcggtcaaagaagtcgaaaaattcggtgaagaatacggttacccgtttattattaaagcttcactaggcggcggcggccgaggtatgcggattgtcagaacgaaagaggagctgaaggaagcttatgaccgtgcgaagtcagaggcaaaagctgcttttggaaatgacgaagtatacgttgaaaaactgattgaaaatccgaaacatattgaggtgcaggtgattggtgacaatcacggcaatatcattcatttatatgagcgtgactgctctgttcaaaggcggcatcaaaaggtcattgaagtggcgccaagtgtgtctcttacagatcaactgcgtgaagatatttgcgaagcggctgttcagttggcccagaatgtatcgtatatcaatgcagggactgtagaattccttgtcgcaaatggagagttttactttattgaagtcaatccaagggtacaggtagaacacacgatcactgaaatgatcacaggtgtcgatatcgtccaaacccaaattcttgtcgcaaagggtcatgaccttcacagcaaggaagtcggtataccaaagcaagaagatatttttacacatggctttgccattcaatcaagggtcacaacagaagatcctttaaatgattttatgccagacacaggaaaaattatggcctaccgttcaggtgggggatttggtgtacgacttgatacagggaacagctttcaaggtgcagtcattacaccttattacgattcactattggtcaagctgtccacatgggcgctcacatttgaccaagcggctgctaaaatggtccgaaatttacaggaattcaggattcgcgggattaaaacaaacattccgtttcttgaaaacgtggcaaagcatgagaagtttctaaaaggggaatacgatacgtcgtttatcgattcaacgccagagctatttaatttccctaagcaaaaagaccgtggaacgaagatgctgacttatattggtaacgtgaccattaatggattccctggtatagcggagaaaaagaagcctcattttgacaagccaattgtaccgaagcttcctcttcatcaagagattccgtctgggacaaaacaattgttagacacacatggacctgagggccttgccaattgggtgaaagaacaaaatagcgtccttttaacagatacaacctttagggatgcgcatcagtctctgcttgcgacacgcttcagaacacatgatttaaagaaagttgcccagccaacagcaggtttatggccagagctgtttagtatggaaatgtggggcggtgctacatttgatgttgcgtaccgtttcttaaaagaagatccttgggaacgattaaaagagcttcgccaagaagtgccaaacacgttgttccaaatgcttttaagatcatcaaacgctgtcggatatacaaactatgcggataatgtgattaaagcatttgtaaaggagtcggccgaagcaggcattgacgtcttccgtattttcgatagcttaaactgggtcaaaggcatgacgcttgccattgattctgttcgtgaatcaggcaaagtggcagaggcagccatttgttatacgggggacattcttgatccatctcgtccgaaatatgatcttgagtattatgtatctcttgcgaaagagcttgaatctgccggtgcacatattttaggtattaaagatatggcgggattattaaagccgcaggcagcttatgagttagtctctgctttaaaagatgagctcacgatccctatccatcttcatacacatgatacgagtggaaatggactgttcacctatgcaagagcgattgatgcaggcgttgatattgtggatgtggccgtcagctctatggcaggactcacatcgcagccaagtgcaagctcactgtattatgctttagatggacatgaaagaaagccagacatgaacgtccaatctgtcgaacacctttctcaatactgggattctgtcagaaaatactatcgtgagttcgaaagcggcatgaactcacctcatacagaaatttatgagcatgaaatgcctggcggtcagtatagtaacttgcagcagcaggcgaaaggtgttggccttggcgaccgctggaacgaagtaaaagaaatgtacagacgtgtgaatgacatgtttggtgatattgtgaaggtcacaccttcctctaaagtagttggagacatggcactttatatggtgcaaaatgatttaacagaggaagatgtctatgaaaaaggagcaacattagacttcccggattctgttgtggaattatttaaaggctatttaggccagccgcatggcggattccctgaaaaattacaaaagctgattttaaaaggagaagaaccgctcactgtcagacctggtgagaagctgaagccagtggactttgaagctattcagcagcagttcaaagaatctcatgacctgacgctgacagagcaagacgcgattgcgtatgccttatatccaaaagtcttttctgaatttgtccaaacagcagaaagctatggggacatctctgttcttgacactccaacgttcttctatgggatgaggcttggtgaagagattgaggtagaaatcgaaaaaggaaaaaccctgattgtcaaactcgtgtcgattggagaaccgaatccagatgccacaagagttctttactttgagctaaatggacagccgcgtgaagtggtgattaaggatgaaagcatcaaatcttccgttcaagaaaaaatgaaggcggaccgttcaaatccaaatcacattgccgcatcaatgccaggcactgtcatcaaagtgctcgtggaaaaaggacagaaaatctcgcaaggtgagcatttgatgatcaatgaagccatgaaaatggaaacgactgtacaagcgccattcactgcggtcgtagatgaaatacatgtgacaaatggagaaccgattcaaaccggtgatctgctgattgtgttaaagcctgaataataagtgagacacatccgtcgtgatgtgtctttttttgagcgcattaaaatgtgcagcagcctgcgagagtaattacactatagagtgaggtgaagaaagttggaaattgtcgtgatttggtttcgccgagatatgcgattggatgatcatatcgccttatcaaaagcgatcacatatgcaaaaaaacacgagtacaaattattggctctttatcatctagatccattttttactgaaatggaactggatataaacaacgaacatttctttcaaaacttggcgcatttcgtcaaggaagcgagagaatctcaaatttatgttcaccttctccatgatgatgtcctgcgcgtctttcaacaggtcatggatgtgtatgacatcaaagccgtcttttttaatgaagatgaagtgggtatcggccaaaggcgtgaccagcaagtaaccgattttttagaaaagaaggccattcatgtgtcaacgtggcaagatacacatcttcacggggcacgagatattttaaaagcagatggctcacattatcaagtgtttaccccatactatcaatcatggcggaagcaagagaagcagcctgtgataaaagttgacaaatcatttttcagcagcgagcatacgatttgtgatgagtcactttcgcaaaaaggaaatgacaaactgcgagacttgttaaagggctgctcaaggaagtttgaacaaatcggctcagacaaagcgatgaacacgctgcatcactttatccaaaaaagattaacgcgttaccatgagaaacgagatattccgtctctttttggaacgagcaagctgtcgcgtttcttaaaaacaggcactatttcgatccgaacgatttttcatgcgatgtatgaagaagcactatttgaagacgggggcagagagacctttatcaaagagctggcatggcgcgatttttaccatatgatttatgcacattatccagagatgaaagaaaaagaaatcaattcggcgtttcaaggaatgaaatggaatgaagatgaggcgctgtttgaagcttggtgtaaaggggaaacaggctttccgctcgttgatgcagggatgagacagttaaatgaggagggctggatgcataaccgcttgcgaatggtcacagcctcatttttaacaaaggattatttgattgattggagaaagggcgaagcgtattttgcaaaaaaacttgtggattatgatgaggcgtcaaatatcggaggatttcagtgggctgcctctgtcgggacagatgccgtgccgtacttccgtatttttaacccaacgacccagtcgaagcgatttgatccgagcggggaatatattagaagatatgtaccagagctagagcatgtcgatgaaaaatggattcatgaaccaagtaaaatgccgattgatgagcaattgaaatcgggatgtgtgctaggtgatacatatccgctgccgacagttgatcatcaggaaagacgcaaaaaagccatttcgctatttgaagaagcaaaacaacaataaaacaaatcccccattccgcatgaaagggggatacaaaattcttatttgaatggttctttgctttcatatttaaaccgggcaatgagtaagcagaagtaacaaagtatcccaaacaaaccggaaataaagaatgaatgagccagcgcgtaaccaagtgcaagctgagaataaacagacatcacacctgaaatggcttgaagtgtaatcagaatggctgaaataatccatccataatacagctgcttctgttctttataatgtttcatggcatggaacatcgcaacaaatatccagacgaataaaagaagtgctgctgctcggtgagacatttgcacccactgattaaagtacgctggaagtgcaccgtcttttgaacaaaacgggaagacagaacaagcaaggcttgactttgtatgcctcacataagcacccgtatacaccacgatatacgtataggtgatcaaaccataaatatggaactgcatttttttgccgatatgaagcggcttcacaagctttgtttcagatctggttgcttcaaatacaagaagcgcaagcagtaacactgaagcaaaagaaatgagtgaaataccgaagtgcagtgccatcacaagggcgttagaaccaaacacgacggctagagctcctaaaagcgcttgaagcagtaagaatataatcgacatgatgaccaaaaatttggtttcacggaatactggactaatctttttccagcataagaccgccagtgccagaacaagaatggtggaaacccctgttgacatgcggtgactccattcgatgatggaagcagggttcatttcagggaagaaacgtccgtggcaaaggggccactgccggccgcagccaagacccgagccggttttcgtcacaagcgcaccgccaatcaaaacgatcagcatcacaaacgttgtgatcacgctcaataaccttaaagcaaatttcatcaaattatttcaccttctctaaaaaacttctgatctaaatgaaaaacctcatatgctctcaagtttaagccaaatgcgtgttctgttgcaattcataatgaccaaagttcacaaaaaaatgatatgttagttcacaaagtttacagatttagagtgcttgatctttctttgacagtctgatagaaatagaggagagaatatttcattttgcaccgccttctgaaacacacataaatccttataaattcacgaaaagttcacaaataacttcaagattgtcgtttattatttaataggatgtttttttacagctgtttatcttgtatgatagagttgtaacgaatttacgtttcatttgttcgtttgaaggtttgggcaagggaggttatacacattggcaaattccaaaacagccgcggaagcagctattcatggacaaatagaagaaacaacagcttggaaagattttcttgctctgattaaaatgggcatcgtcaattccaacttcattacaacatttactggaatgtggcttgctttttattttacaggtatgagtttccttgggaatcttgatattgtgctgttaacaatgattggttcttctcttattattgccggttcatgcgccattaataatgcgtttgaccgtgatattgatatattaatggaaagaacaaaaacaagaccgacggttacaggtaagattcagccggggcaagcgtatgcatttggtattttgcttgttgtacttggactcatcatgcttctgatgacaaccataacatcagcagtgattggttttatcggagtctttacttatgcagttctttacaccatgtggtctaaacgtcattacaccatcaatacagttattggaagtgtatctggtgcggtgccgccattaatcggctggacagctgtcacaggtacaattgacacaacggcttgggttttgtttatgattatgttcatttggcaaatccctcacttcctgtcacttgcgattaagaaaacggaagattaccgtaaggcaggtattccaatgctgccagtcgtttatggctttgaagtcacgaaacgccaaattatcatttggacagcatgtcttcttccacttccatttttcttaggtggattaggatggccgattgtcgcacttggcacattgctgaatattggatggctcgtcattggccttatgggctttaaaatgaaagacgtcatgaagtggtcaacgctcatgttcgtttattcattaaactacttaaccatctttttcgtcgcgatgattatcattacactattctagagtaaaatacactttgatcacatcaaaacaatggctatatcttataacacaacattttctaacaactatgaaagccgcctgatattcagttctatttaggcggctttctgtttatacatagatggtattttgagtaaaaacatcatttttttatgaaaagaggaaatgtaagtgcttttataagaggcgggggttatgaatgggtgaaaagtgattttataaataagaggtaaaaagcgaaaggcaaaggagatcaagcaaaaggggttgggacaaattatgataagaaaatggcgtgtttattcactgtttctcttactgacgctcgttttggcgggctgtggtgaaccatacttatcaacactcaaaccagttggggaagtagcagataaacagtttttcctaacggtactgagtacactcattatggttcttgtcgtcattgttgtatcgatcattttcttttacgtcatcattaaattcaaacgttctaaagtgggagaagatacgattccaaagcaggtggaagggaaccgtaacctagaaattacgtggacagcgattccgattcttctcctcattattctcgttgtgcctgttgtggcatacacgcttgagcttggggatacaagcgctatggataagaaaaaacgagatcctgaaaagacacttgtcgtcaatgtaagagccagtttatattggtgggaattcgaataccctgattatgggattgtcacaagtcaggaattgattgtaccgacagatcaaaaggtgtactttaagctgaaagcatccgatgtgaaacactctttctgggttccatcggctggcggtaaaattgatacaaacacagaaaatgaaaacaagttttatttaacctttgattcaaaacgaacgaaagatgcaggagaatatttctacgggaaatgtgcagagctttgcggtccctcgcatgctttaatggactttaaagttaaaacgctttctcaagatgagtttttgggatggacgaaaaaaatggctgattacaagaagcctacatccacaaaagatctcgcacttgaaggtgaaaaattatttaaagagaaaaactgcttgagctgtcatgcagtagagcctggtgacgaacggccggaagcggcaaggacggcaccaaaccttgcgaccttcggagaccgaacgaaagtagcaggaatcaaagatatgaacaaagaaaatgtgaaagcatggctgaaagatccagagagctttaaaccagggaataaaatgacagggacgtaccctaaattaaatgactcagaagcagatgcactttatgagtatttaaaaggacttaaaatcgagtaatttctaatgcgaatgtgcaagagggtatgtgatcgatgtgaagtttttgttaagagctcccgaatatgtctctacaaccgagaagtagccatctgtcagacacagtctgtgtaaagttaagatagacatctatatgaaaaggggcaaatgggagataagagggggatttcatggtgagtacaatagctaaaaagcgggggtttggcgctgtcttatgggattacttgacgacggttgaccacaaaaaaattgccgtactatatttagtggcagggggatttttctttttaattggcggcctggaagcgatgattatccgtattcagctagccatccctgaaaatgattttgtaagtgcagggttttacaatgaagtcatgacgatgcatggaacaacgatgattttccttgcagcaatgccgcttttatttgcattaatgaatgcggttgtacccattcaaattggtgcacgtgacgtagcgtttccgtttgtgaattcacttggtttttggctgttctttttcggaggaattttcttaaaccttggatggtttatgggtggatcacctgatgcaggctggactgcatacgcctcgctcacgctgaattcagaagggcacggcatggatttctatattttaggtttgcagatagcgggtattggtacgctgattgccgggatcaactttcttgcaacgattattaatatgagaacgcctggtatgacgtatatgagaatgccgctctttacatggacgacatttgtcgcctcagcactgattttattcgcattcccgccacttacagcagggcttgcgatgctgatgcttgatagaatgtttgatacgagctttttcaatccagagctcggcggaaatacaatcatctgggagcatttgttctggattttcggacacccagaagtatatatcttaatcctgccagcattcggaatattctctgaaatcattccagtgtttgcaagaaaaaggttgtttggctattcgtccatggtgttcgctactgtattgattggtttccttggattcatggtatgggcgcatcacatgttcacaacaggacttggtccgattgccaatgcgatctttgctgtagccacaatggcgattgcggtgcctacaggaattaaagtattcaactggctgctcaccatatggggcggtaatgtgaagtttacaacgccgatgctgtattccgttgcctttataccgtcgtttttacttggcggggtaaccggggtcatgcttgcagcagctgcagcagattatcagttccatgatacgtactttgtcgtggcgcatttccactacgtcattattggcggggtcgtattcggtattttagctggtgtgcattactggtggccgaagatgtttggaaaaatactgaatgagaagcttgggaaaattggctttgtgctgtttttcatcggtttccatttaaccttctttatccagcattttctcgggctttggggcatgccgcgccgagtctttacattcctgccaggtcaggggctagaccttgggaacttgatcagtacgattggggcactgtttatgtttatagctgttgtcatcatgctgattaacatcatctggactacagcaaaaggagagcgtgtatcgggcgatccttggggagacggaagaacgcttgaatgggcagtgtcttcacctccgccagaatacaactttaaacagcttccgcttgtcagaggactagatccattatggattgaaaaaatggatggtaaaacaggaatgacagcatctgaaccgctcgatgatattcacatgccgaataattccatcttacctgtcattatctcattcggtctatttgtttcagcgtttggcttcatgtatcgtcaagagcacagctggggacttccagtgattttcattggtcttggcattacatttgcgaccatgctggttcgctctcttaaagatgatcatgggtaccatattcacaaagaagatttgaccgatgacgatgataaaggggtgaaagcataatggaaccacaaaaaatgacagcagaaacctttccggcttctcctgagaaagccacgttagaaggaaagaataagttcgtcgggttctggttgtttcttgggggagaaaccgttctgtttgcatcgctctttgccacgtatttggcgctgaaaaactctaatgcaggcggagcaaaaacaactgatatgtttgatctcacacttgtctttattgccacgatgcttctgctgacgagcagtttaacgagtgtgtatgcaatgtatcatatgaaaaactttgcctttaaaaagatgcagctttggcttggcgtgactgtgctattaggtgcttcatttctaggggttgagatttatgagttctatcattatgtgcatgcgtatgaatttacaattaccagctcagctcttggttcttccttctatacacttgtcggaactcacggggctcacgtcgccttcggactttgctggattaccgctcttatgattcgaaatatgagacgcggactcgatttatacaatgcgccgaaatattatgtggcaagtctgtattggcacttcattgatgttgtgtgggtcttcatctttaccgttgtatatttaatgggaatggtgggataagaatgggaaataaaaacacaaatcagtctaaagtcgatcttgtataccgtaaaaagaaaaatgccgaagaaatgaagcatcagctcatttctttcggcttgatgattggattaacctttgttgcctttttaacaattgcttcagaagacgttgggaactggttcgcagtaccatttattttattgcttgcagttattcaggtggcttttcagctttattattttatgcacatgaaccaaaaagggcatgaaacacccgcattgtttctttactcaggtgtgtttgtcgcgtttattaccgtattagcctttttgaccattatttggtggtaagcccgctttgcccttgaaggaggcgcagcaatggagaacttagaaatattcggatttcgggcattatggagcccttactatttgactagtattgtcatagcagctgctctttatttgcttcttgtgacaaagggaaagcaccgtgcgacggtgaaagagaaaacgttgtttctgacggggcttgtcctgttatacgccgtgaaaggaagcccaattgatttaatggggcatattatgtttagtgcacatatggcgcaaatggcggtgctctatttagtcattccgcctctccttattacaggattacctgcggccatttgggagcggatcatacaaacaccaggcattcagcaaatttttcgtttgttttccaagcctttaattgcattgcttggatttaacggattgttttcgatgtatcacattccgcttgtgtttgattttgtgaaaacagatccgttttatcatgcgttgatgacggtggtcatttttatcgctgcctttttcatgtggtggccgctcgttcataaagtccaaagtcagccgcagattacaggcattttaaagcttggttatatcatggcagacggaatattgatgactcctgcgtgtgctctcatcatgtttagtgaggcaccgatctatgcaacctattctgatgctggcgcttggatacaggcactgcacttatgcgtgccaagtgatatgctggcaggccttgcgctcacaggtcctgaaatgttccataccttgcctctgctagaggaccagcagctaggcgcgattttgatgaaaattattcaggagattgtgtacggctcgatccttgctgttgtgttctttgactgggcaagaaaagaaagagcgaaagatgccgtaccagatgcgctgattccgaaatatgaatgaaaaaagcacagccgtatggctgtgctcagattgttgacaaagggctaaaatgatcttgattttagccctttgtcttcttttatgcttcagcagtcattgcttctagtttatctttcagctgttcaagcgttttcttgcttgattggatgagagatttagggaaatcttcgccttcgccgtattcaacaccgtgcggataataatgttttccaagtaaaggtgttagaagctgtatgtgtgctcttttggaaccaacatctccttcggtggcgtagccggaaatccgtaaataaaaggttccctctaccatgttatactttctgtcgtacgtcacacgctcataatcccattgatcggctcgtacaaatccttcactttccatgatgaaatctaatttatttaagtcagctgctaccttttcaatccccgtaccttcaaacttcacccaaaacccctccttataaaaattccctttactgacaatcatagtatgaaagcgttaaactttcaactgtgaaaggtatgttcttttataacctggttacagtaataaagaaaataatagatggaggaatcgatgtgaaaacgaaaaaaatcaaagatattatgacaaaaaaagtagtgacatgtcagcaagacgacaatacgtatgaagcggcagtcaaaatgagagacgcggacattggggccattccggtggttgacggagatcagctcgttggcatagtgacagaccgtgaccttgtactcagaggcattgcagaaaaaaagccaaactcacaggaagtgggctcgctgatgacgaaggaagtactgacagctgaagaagatgcaacgcttgaagaaattgtccggctgatgtcagagcaccagctccgccgcattcctgttgtgaaaaatggcgctttaacagggattgtcgctcttggagatttatcagtcgaagatttatcaaatgatcgcgcgggagatgcactgacagaaatctctcaacaggatcaagatcacgggcaaggatttcttcattaagaggggcatattttaaattcgtgttaaataggctgtattgtcgttgataaatgaagcgagttttgtttaaatgacagtagaaggtactttttgtaccttgccaatttaacggaggtgtttatttgaaaactgtgctcaaaacactcctcatcctcctgattatatctggaacgtacgttctgtttattcaatatggatcttcaccagaaaaagaaaacagcaatgaaccgaaggtgtctaatgaagaaacatctagcgataagccgatcaacatcccgaaaaaggggctcatgtcctttatggggaaatcttcaaacgaagtgcttaaacagctgggagaaccagatcgcattgatccttccgcatatgattatgactggtggatatacaaccaatcgaagaagcactatattcaagtaggggtaaaggatagtaaagtggtgaccctgtttgcaacaggagacgggctcaatgtcgaaccgtttaaaatcggtcaagccacaagtgaagtatttaaaaaaacacaaattgcaccttacattcatgtagaggatgaacaaaattcataccgctttgaattctcagaagatgatatgaatacaagacccactgtgaaagtgggagatgatgtgtatgttcagctttacatggataagtttgaaagcactctttcaagtatcagggcgtttaacgcagatacatttgtgaaacaaaagccatatgaggtcgtctatcgtggtcaattgatagaacctgaggcaatatcaggtgaaaaatggaaagagatcgaagcttccagtcaaaaacaaatttttgatatgaccaatattatccgtcataagtacaaactgccgaccttaaggtgggatgatgaaacctctgaagtggcattcatgcatagtgaggacatgaaagagaatcattatttctcccatgaatctaaaaaatacggtacgctgaaagatcggttagaaagaggcgaggtggcatttcagctcgcaggtgaaaacattgcctataattatgtagatggacctgcagcggtagaaggctggctcaatagtgaaggtcacaggaaggcgttattaaataaagattacacacaccttggcgtaggtgtgaaagaaaaatattacacccaaaacttcatcaagaaaacatcttaaacgaaagcagctgcacaatcgcagctgtttttttgattgaaaaagaggctcaccaaaatagctgctggtgtatatagtatagtaggcatttgtatggggggtgaggatatgacaaacaaacaaaaacaaacatccattgatgaatttaaacaattcgtcagacgccatccgaagttaattcaagaagtgcaaacgcaagaaaaaagctggcaaagtgtatacgaaaattggatcatgtttggtgaagaagacgatatgtggtctccttaccggcaaacgcaatctaaaggcggtaaagaagaaaaagcctctaagccaagtgaattgggaaaagcagattttatgtctaaaatggtttctgctgtgaaaaaaatggacgctgatcaaatgaatgaacaaatcaacaaaatgagccagtctatttcctctttacaaagcttactcggacaatttacatcaaatggctcaaaaaaaggttcatctggaggcagtcagcacccattctccttcaggaaagattaattgaaaggggatgcttttggtgcggaaagaagtacaggagtttgtcatggccgaagaggatcgaatcaaattcatcagacagcgtcctctctggtacagacagctgactcgacatcctgaaaagctatcgtcctttgaattagataaaatgaatttttacgaaaaaaccattcctcatcgtgtgagtcagttgagcaacagtgtccaaatggctgaaatgatgattcaaatgttccaagcaatgcgcaatcaaaatggagccgggtgaggcttttttgagttgattaagatgtctatttcctgagcatcctataaaagtagatgaaaggagaatcagaagatgaaatggatgctgtcaatatgcgcattgctttttcttgtcaccgggtgtcaaagtcaacatggagagaagcaagtcatgaagcaagatccagctgtaccagtgatgcagcaagccgaaagcgaaatgaagcagcaaggctttttaaaatacaaagtgcaggggtcttctgtctatatagaaagtacactacaagattttcatcttgaaccttcgcgtctaaaaaagaatgagaagacgggatattttacagtgtatgtagacggaaaacgtgcaggtaatgagtatactgctgcatttgtggtcaagcatctttcaaaaggaaagcataaaatgaccgttgtgctcaattctcgtcatccagaatataagcagaaaagagaaacatgggatgtatttgtcacgtaaaagcattttctgatccataggtttcgtggtaaactatgaattggaggtgcaacatttatgtatgcgacaatcgaatctgtggagctccaagaggaagcgaatcaattggctgccatgattcttcagtcggaggaggctgaacattaccgcaactgctttaagcgtctccagcaagacgaagaagcccaacaaattattgcccattttacaaaagtaaaagagcaatatgaggatgtgcagcggttcggcaaataccatccggactatagaacgatctcaaaggaaatgcgtgaggtcaaaagaaagttagatcttcacgatacagtggttgatttcaaaaaagcagaaacagcgattcaatccatcttagatgagattagtattgaaatcggtcaagctgtatcagcatatatcaaagttccaacagggaacccatattttgatggtctatcatcatgcggcggtggctgtggatcaggtggcagctgtggctgtaaagtatcttgacgagacttgaatgtctcgtcttttacataatgactgaaaagaattgaaaaagcggcaggtgaaaagatggaaaccaaacgtcaagggatggtcgtttggctgcattcgttaaagcagtcaaaggcgctaagaaaatttggaaatgttcactatatttcaaggaaaatgaagtatgcagtgatctattgtgatatgaatgatctcgagcgtcatatggctaagctcagctcattgccatttgtgaagcgtgttgagccttcatataaaccttttattaaattagagtacgaatccaaattggacaaagcaaaagagtatgattataaagtgggcttttaaagacacaaaaaaatccccgcggcatcacccgcggggtccttctattcttaatgattcattaaggagaaggcaaagggagaggagaaaccggaggaagaacttatggggaaacgtaagtcttctccgcggttggcaacagcaccacatcagatgctgttataaatagtatgaccccgcattccttgatctatacatagaaaatgaatgaaaatccttgcattgtcccctgcggagtgttgtggtaagataatgttgaattttttgtcataaacaataaccaatagaagcaagcagaaaaagtggtgggaaaatgagagtcatctctggaacgagaaaaggccgcacacttaaagcggtaccaggtcaatcaacaagaccgacgacagataaagtaaaagaatcgatatttaatatgatcggcccgtattttgatggcggatgggcccttgatttatttgcgggaagcggtggtttaggaattgaagcgctttccagaggattcgatcattgcattttcgttgatcgagatatgaaggcaattcagacgattaaaggaaacctcaaccaattgtcgctgctcgatcaaagtgaagtgtttcgaaacgaggcaaagcgtgcactctcagccgttgtgaaacgagaggaatcctttcaagcgatctttcttgatccgccttataaagatcaacagctgaaagcacttcttgaaatgattgacgagcatgccttattaacagatgacggcgtgatcgtgtgtgagcatgataaggacgtcacactgccagaggaagctggacagctttacatatcaagacaggaactgtacgggttgactggtattacgatctatagaaagcggggaaattaaagcatgggaaacatagccgtttgtccgggtagctttgatccagtcacattgggccatttggatatcatcaaaagaggtgcaaagatctttgatgaagtgtatgtatgtgtactaaataactcatccaaacaaccgttatttaccgttgaagaacggtgtgagctcattcgccaggcgacgaaggatctgccaaatatcaaagttgaatcctttcacggtctgcttattgattatgcgaaacaaaaagaagccaaagtcattttacgcggattaagagctgtgacggactttgaatatgaaatgcaaggcacatcaatgaataaagtgttaaacgatgaaattgaaacgtttttcatgatgaccaacaatcaatattccttcttaagttccagcattgtcaaagaagtagcgaaatatcatggatcagtcaaagatcttgtcccaaaagaggtagaagcagcgctgaaagaaaaatttaaaggatgagtgcaccgtgcactcatccttttttaaatttctgatagtatagcgcgatatacaagatcaagctgcatagcgtgatcaatgggccagctgtcacaagctgattccaaagcacactgctgtacacgacgacctgctggcttgcttcaaaggcacctgctgggagagccatgtcagatcgagagacataaagaggcttgaacaataaaaaggcaaaaacagctgcataaattccgtgaagcaaacgagcgaagaaaaacggtttaaagcgtatatctgttgccgccagaatgccagcgacctgagcttgaacagaaaacccgctgaatcctaatataaagctgacgacaatcgttttagcaagaagggtgacttcctgtgaccctgtcagctgacttcctaatgtgatttcaaataaaccggcaatcatcgcaagatctaattctggcggaagatgcatcgtttgcagcatatatccgatccctatggataagaggtccgtcacatgaacaactgacagcattttactaaatacagaaaataagataataaagccgccaatcataaagagagtttggactgatgacatcaccgcatcacttaaaatttggccgagcggtcttttctctgcgagtcttgctgtatgaagagcgctgaatgcctcttgaaacgatggaaataaaaatcgcttacggcttctcagatgtgcatcatgccgcgctttatatccccgcatcgtcacaccaacagcgagattccctaaataatgtgcgcatgccaaaacaatccctaaagctggatgatgaaaaaaaccaacagccaccgcaccgaaaataaacaatggattcgatgaatttgtaaaagaaacgaggcgctctgcttcgatttgtgtcagttgtccttcctgcctgagtcttgtggttaatttcgcaccagaagggaagcctgatgccattcccattgctaggacaaatccccctacaccaggcactcgaaagatggggcgcataaatggctctaataataccccgacaaatctgacaatcccgaaactaattaatagctcggacaaaataaaaaaaggaagcaatgatggaaatacaacctcccaccacattgcaagtccatttttagacgcttgcaaagaggcttgtggatgtgtaatcacagtggctgttaaaaagataaaaaaagcagcgatgaacagagtgttccattttttcatggagatttcgccccttgctgttatgatctattggcgagctcgtgatcaaaaaagaaagacactagccgagcctgtcttctattactatacgagcagaaggggcatgtttagaccaatagattcgtatatatgcatagaaaagaggagggtggattttcatgaggcgaccagtcattggacttgcgttaggctccgggggtgcgaggggaatggcgcatatcggagttttatctagtcttgagaaacaaggaattcaggtagatatgatcgctggcagcagtattggcgcacttgttgggagcttttatgcggcaggacaagacgtagaaaaaatgaaaaaacttgcacttgtcttcagaagaaagtattatgctgactatacactgccaaaaatcggtcttttaaaagggaatcgaatgttgcagctgattcacacgtttacatatgggaagaaatttgaagaattaagaatgccccttgcggtggttgcctgtgacctcgagacaggggagaaggtcgtgtttaaaaaagggtctgtttcacaagcagtcagagcaagcatcagcattccgggcgtgtttgttcctcatgaaatgggcggcagacagctagtcgatggagcggttgttgaccgcattcctgtgtctgttttaaaagaaatgggcgcagacctcattatcgcctctgatgtatcaagggtgaaaaaaacagaaaaggcgacgagattatcggatgtgattatgcaaagtttggacatccttcaaaatgaattggtccgccatcaaaccattcacgctgatgtcatgatccggccgaggcttgaaacatttagctcgagtgcatttacacaggtgcaggagatgattgaagcaggtgagctcgccgcagatcaactaacaggtaaactgaaagatgtcattgataaatgggagtgttaatcgaatgaaaaaattgaatattcgctggctcagcttttttgtcgttatccttgtattatttggcttaacctttgtcaaactgccatattacgtgacaaagccgggtgatgcaaccgagattgctccccacattcaagtagacggcggatatgacgagaagggcagcttctcacttatgacgataaaagtaggtccagccaatccgtatacgtatttgcttgcgaaaatgaataaatatgacgagatcgtcccggaagaaaatattaaagcggacggggagtcggatgaagattatatgaaaaggcagcttcagctgatgaaaagctctcaagaaaatgccatgattgcagcgtatacaaaagcaggcaaaaaagtagattatacgtttaacggggtatatgctagctacgtgatgaaaggaatgcctgcttacggcaaaattgaagtgggcgaccgaatcaaaagcgttgatggcaagacctatgattctgctgataaaatggtttcgtatatcagcagcaaaaaagcaggtacatctgtccgttttgtccttgaacgaaatggcaaagacatcacggagaaagtgacgttaaaaccatttaaagaagagccgaatcgagttggaatcggtgtatcattatttacagatcgaaatgtgaaagtctcgccttccattaaggtggatattgaaaatatcggcggcccatcagcaggtctcatgatgtcacttgaaatttataaccagctcacaaaagaagacgaaacacatggctatgcgattgcgggaacggggacgattgacgccgatggaacggtcggtccaattggcggaatcgatcaaaaggtcgtggcggcagataaagccggaaaagatatattctttgcaccaaacgataaaggtgattcaaattcagactaccgaaatgctgtcaaaacagcgaaagatattaaaagtgatatgaaaattgtgcctgtagatacgatgcaagatgccctgaactatttaaacaaattaaaagagaaagcatcttaatcaaagaagagcagccttcatcaaggctgctctttttgttaagactggaagagaccagtctcttcatcatatcggatcggtgaggttttaaactccgcttccgttaagtccgtttgcattggctcactaacgggcaggctgaagacgcgggacgcgcgaatatcaagatcaagtgcgggatgtgaaaaggcagacagcttgcttatgagcggcacgtccaattcttttttcacaagagataagtattgctgccctttctttgacataccaagtaaacgaatgtaaggcgcttctctctctttcagcagctcatgcatggcactctttttcaccctcattaagagatgtgtattcatccgctgcagccttgtccacgtatatcgttttgttttcacaagagatagatattcctcgtaggaggacgcatgtgaaatcgccttttgcatgcggtgttcgatgccttcttcgatttcatagatgccttctagttctgctgtatccattgtgtgaaagacttgttttaagaagctaaagtaggcttcttgcgtatgtaaaagaccataagaagaatgatagtcatgtaattgcttgagcgtagcttctgggagatatggggcgactgtttcaaatgtgccgtgatcttttaaggcttttcgtatacttgttgcgcttgcgattttctgatttttaggaagttcttcatcatgataaccagatgaaatcctttgagaggtaaagggctgcatgtgaggggatctctccaagatggctttgacataatggaaacctaaaatgttatttggcttggacagatccagtaagtgcttaggatcaatcacctcttgaaacgcagctgctgcagctgctggataactaaggccttctttcaccttttcttttgtgaaaaggtcaatttctccttttttctcaagccaagcatgagccgttcgctcaaatgctttaatgtcaccatcctcgctgccgaaaaaaagggagcggcattttaaagcatctagaatcgccacagcaccgtttgcaaaggtttctgccttttgcactgcgtatatgtatggaagctcacacacaatgtctacaccgttttgcagcgccatttttgtccgcgcccattttgagacgatggcaggctcaccacgctggaggaaggaaccgctcatgacggcaatggcaacatctgaggaggtatgtgttttcgcctgacgaacatgataggcatgtccataatgaaatggattatactcgacaacgactcctgttgctttcaatagatgttccgcctttcttgctatggttaaatggtctatgctaaagtagcataagggaaaaatgaagcccatttttttcagtgtaggcattccgcgaactgatgtcaaacaaccctctgacatcacaaaggactgtaaagaaaaaatattgacaaataacatgatgaaagctataatcatgtttgttgctcttagaggtgatacaattgaaatggacagtttatcagttacatcaaaaagctaaaaacagcttcgattttcatgagacggttgacttaaatgaacttactagccttcattcagatatacgtcgcatttcaccggtagaggtgaaagggactggagtgatcgaatcaaagcaagtcgcatttgatttaaccatcacaggtgaaatgacattgccttgttcaagaacgcttgttgatgtaaattatccatttgcgatttcaacgaaagaactatttgtacttcataagacagacgatatagaagatgaagacgtttctattgtagaagacgacatcatcgacttaacgcctatagtcaaggaggaaattcttcttgaagtgccgatgcaaatcttttgcgaccaaacggatgtaaaaggtgctgcaccacaagaagggaatgactgggcggtcatttcggaagatgcacatcaaaaccgaattgatccgcgtctggaaggcttgaagaagctcttagaagaaaataatgaatcttaactctttaaggaggtgggaataatggctgtaccttttagaagaacttctaaaatgaaaaaaagattgcgtcgtacgcatttcaaactacaagtacctggtatggtagcttgcccagaatgcggtgaaatgaaaatttctcatcgtgtctgcaaatcttgcggaacatacaaaggcaaagacgtaaaaagcaactaatgcttgataaaaaaacgtgagggaatcttcccttgcgtttttttatttgtctattttttaggtttctctcctgcaaatagtctatctactctagtaggcgcatatgatgtggtattcagattcaggggggatgatcaattgacgattacaaggcaggacgcatggacacaagatgaagatttacttttagcagaagtcgtcttaaggcacattcgagatggaggaacgcagctttccgcatttgaggaagtcgggaaagcattgtcaagaacagctgcagcatgtggtttcaggtggaactcatacgttagaaaacaatatcaggcaggcatagagctggcgaaaaaacagcggaaagaactgcgtaaaaaaatcggtattcattcctctggtttaccacagcatgcgttaaccatagaagagaagacatcttcaattcaggctgaattgacccttcgagaagtgattcagtttttagagcagcttgaaaaagaacctgatggacctgctcatttacgcgaggaactggcagatgcacagcatcaattgaagacactttcagaagaaaatgaacacttaaagcggcaattaaaaatgacagaagaagattaccgggcactcataggtattgttgaaagagtcaaacagaatatcagcttaaaagaatatgctaaataaagagacgcccctcacagagaaaggaggggcgttttgtgatcagtctttaagcggattcacctgtatttttttgaatatgagcgggctcccagatgagtggattttcacccttatcgcgctccatatcatattttactgcttcaaagcccattttatcccaaaaaccggctgatttgacgcgcggattggtccgaattggcaatccgaacgatttggcgaattcaacaagtgcttcgccgtaccctttgcgctgatacccaggaagcacttccagcttccacagctctaaataatcatgattgtggttaaaatacgttgtcgttgagccgtccacttgataaaggctcatacgtgccactagcttatctccaaaataaattccgtaaaatggagagttgctgtcattttcaatcatattgctttcaaggtcttcaagcatggatagctcttgtatgccgtattccttaaattgtttaaattcctctaaagttttgtaattaattagaagtcgttttacttgtgccatatgatcttcccccttacacacataatgtcgacagtgatgtcattgaaggcgttttcatcccatccgcctcgaaaagtttttacacttattattatagtttttaaattaaaaaaattcaatcatagcgcgccatctgctttttgcatcacgacatgaacctgttacaataattgatataatgaagtaaacagaaaaagggaagtgcggcagttgaacattggaatcattggcggcggtgcgattggtctgctttgtgctagttatttatcacagcatcatgacatcacggtctttacaagaagaaaagatcaggcagaagagattcgagcatcaggcattcagcgaacagtaaaaggagaaacatgtcaggcggctgttcatgcacagacaggaataacaggagtatttgatttgctcatcgtgacagtgaaatatcatcatttgcaagatgtgctcgatgaattatcgacattacctcgtcagcgtatcttatttttacagaacggaatggctcacttattagatttggagaattggaaaacggcacattcattatatataggtgtggtagaacacggggctatgaagatgtcagatcatgcagtgaaccatacaggtattggtgtcatcaagtggggggcatttcagcatgaggaagcagctgatataaaaaatgcattgaatgagacatcatctcattttcagatgatctatacggatgaatggaaaaaggtgctggaggaaaaactgcttgtcaatgtctgtattaatccgctgacggctttgctgcatgtgagaaacgggaaattgatcgcaaacccctcatatgaatacatgatgaaatgtgcatttgatgaagcggtatccatcttgggattgtctgaaaaagagcggctctggccttatgtagtctctgtttgtgagaaaacggctgcgaatcagtcgtctatgcttcaagatattgtgaaaggccgccaaaccgaaagaaaagccatcgttggctatcttttaaaaaaggctcaagttcaaggtgttgcggcgccacatctcactttcttttatcgaagcttggaagtattggaaaaaaagcaaacaaaatcttttgagtgagatcatttacatgctatacttttttcgggaaactaactatttattgaagaaaggaagttctaaacatgcaattgactgaactttccatccgaagtcagaatttattcatacgtgattatatagaagaaaaaaaagagatgacgactttttttgattatgatatacattctgagcacacatggaaaaagagatacgacgatctcatggaaatgagcttcccgcgcgaggctttagcggattatatgagcgcataccatgcaaagtttgaatcggcagcgatgcgtcagaacattgaaaagatccgtgatgaacggagtgtcatggtggttggaggacagcaggctggtctattaacaggaccgctttataccatacataaaatcatatccatcattcagtttgcaaaagaaaaagaaacagagcttggagtcccagtgattccggtcttttgggtagccggtgaggatcatgacgtagatgaaattaattttgtgtacacgtctggcgaaaaagaaccagtgaaacaaaagctgccattacataacgtcaaaaaagcggctgcgaaaagaatcccgcttgatcaagaaaaaaccgagaaatggctccgtgatgtgttttcaacatatgaagaatctgcgtacaccaatgacttgctcgatcagcttcttcgatgtttacgcaaatcacaaacctttactgatttctttgaatggattgtaagtgacctctttgaagaagatggactgcttttatttaattcaggtgacttaggtgtcaaaccacttgaacgtgcgttattcaagcacattgttgagacaaatgatgcagtcactgctcgcttaaaagacacgcaggccgccatgaaacgagcaggatatcagccgatcattgaagctggtgacagtcaggcaaacctattttacgaatatgatgaggaacgtttcctaattgagaaagagaacggccggttttctatatcagaagtggggcttacatggacaaaggaagagcttctgcaggaagttgaggagcacccagaacggtttagcaacaatgtggtgacgcgtcccttgatgcaggaaacccttctcccaacacttgcttttatggcaggacacggtgaggttaactattggggagaactgaaaggaatctttgagcattttaaattaaagatggcgcctgttcttccaagactgcatgtgaccattcttgaaaggcacatcaacaagaaactgccggttagagaactgtcggtagaagaagtgctgacaagcggagtgaatgaaaagaaagaagcgcactttgaacaaagtcttccagacagctttgttcaagcagttcaacaggccaaacgtgaattagcgaatgctcatggtgtgatgagacaagaagcactggagattgaaccaaacttcgagcagctgctagataaaaatgccaaatttatcgaagaccagcttcaatttgtttatcaaaaggtggcgcagcgtgtggaagagaaggaaggatatatccttcgggactttgaacggattgaaaatagtttaaaaccactggacgccccgcaagaaagaatttggaatatcatgtattttttaaacaaatatggaccagaattcttcaaaacgttcaaaaatctgccattttcatttcaaaacaagcaacaaattgtcaaactttgaaataaagttttaatgaaccctgactagttcagggtttttttttatgtagaaacagtgtagaataagttttgtggagagaagtggtggatagtggagagtaagggtgagaaagtggggctctgattatcatgttcatgggtgaataccagcatacgattgattcaaaagggcgcatgatcatccctgctaaatttagagacggtctcggagaacagtttgtgctgacgagagggcttgatcaatgtttatttggctaccctatgagtgagtggaaactaatcgaagagaaactcaaagcactaccgctaacgaaaaaagatgcacgtgcgtttacccggttcttcttctctggcgcagtcgaatgcgatctggacaagcaggggcgtataaacatcgcatcaaacctactccaatatgcaaaactcgaaaaagaatgtgtggtcatcggcgtttcaaatcgaattgagttgtggagtaagtcgatctgggaacaatatacagaagagcaagaagattcttttgctgaaattgctgaaaacatgattggatttgatatataataatcccttgtgcagcaagctttctacacattcatttctatttgaaaaaggtgggaccataacatcatgtttcaacatgagacagtattattaaaagaaacagttgacggtttaaacgtaaaagaagacggtacatatgtggactgcacgctgggcggagcaggtcatagctcatatttactatctcaattatcagaaaaaggaacattgattggatttgaccaagacgatgctgcactggatcatgcacgagagaagctcgcggattctaaagcgaacattcttttcataaaaagcaacttccgatatttaaaagaacgtctgaatgaacaaggtattacaagcgtagacggtgtgatttttgaccttggggtttcatctcctcagctcgacacaccagagagaggctttagttatcaccatgatgcacctcttgacatgcgaatggatcaatcagccgcattgtcggcaaaaaaagtggtgaatgaatggccatttgaagatctagttcggattttctacaaatatggggaagaaaaattcagcaagcaaatcgcacgcaaaattgaagaagcaagaaaaaaagcgccaattgaaacaacgggtgagcttgtcgacattatcaaagaaggaattccggcacctgcaagacgaactggcggacatccagcgaaaagagtgtttcaagcgattcgaattgccgtaaatgatgaattgaaagtatttgaagaagcactagaacaagcaatagagttactcaatccgaaggggagaatttctgtcattacattccattcacttgaagaccggatttgtaaaagtacatttagagaaatgtcttctcttccagaacttccgcacggactaccagtgattccagaaggacttgaaccaaagctgaagctgatcacgagaaaaccgatcgttgcatcagaacaagagctggaacataacaaccgtgcccgttcagcgaagctccgaattgcagaaaaaaagtaaaacgacaccatagatgatgataaaaaggaggtttcttatgagtaatttggcttatcaaagagaagtgaagcaacatcaaacagagcagcaaggccaatcggttgtcattaaaagaagaggttctatcacacttggtgaaaaaatcttacttgtcatgtttgtcatggctcttatgtgcagctccattctcatcatttctaaagcctttgctgtctatcacgccaatattgaagtgcagaaattagaacagcaagtatctttagaatcgaagaagatcactgagcttcaaaaggaaaaagacttgctgagtgaaccagaaagaatcatcgaagccgcgaaaaaagcaggcttaagcatatcgaaagatgttaagaaggtcgattaacatggcgatgcctaaaaagaataaaatgatgaacagaggcgcggcaattgcaagtatttgcttcgccctgtttttctttatcatcctagcacgttttatctatattcagattacaggaacggttgatggacaagtgttagccgccaaggctaatgaacaatatcaatcgaagaaaacacttgaagccaaaagagggtctattttagaccggaatggaaatgtgattgctgaggatacatctgtgtataagctcattgcggtcatgagcaagaaaatgacagtggaccctaagcatccaatgcatgtcgtcgataaagaaaagacggcaaaagagctctcaaaagtcatcgacatgagtgaaaatgaaattttaaagcgtctcaatacaaaagatgcattccaagttgagtttggtaaagcggggaaagatattagtttttcaacgaaggaaaaaattgaaaagctaaagcttccaggggtcgcatttgaaaaagacacgaagcgatattatccaaacggcatgtttgcttctaacctgatcggttatgccagattagatgaggcgacaaaggacatgtcaggtgcaatgggacttgagaaggcactgaacaaatatttaaaagagaaagacggctatgtgacatataacagtgacagaagcggatgggccttgccgaatagtaaagaagacattgttgccccgaaagacgggaaaaacgtcacgctgaccatcgatcagaaaattcaagcgtttcttgaagaaagtatgacgcaggttgccaaaaagtataagccgaagaaaatcattgccacagtcgttgatccgaaaactggaaaggttctcgcgatggggcagcggccaagctttaatttaaatgaactagacattacgaattataacaatgatgtcatttcatatgcgtttgaaccaggttcaacgatgaagatctttaccctcgctgcggcgatccaagaaggggtctaccaaggcagtgacaaatatcaatctggtacttataaagtaggcggcggccttgtgagagaccacaacaacggaaatggctgggggaaaattgactttcatcaaggggttcttcgctcatcaaacgtggcctttgcaaagctggcgaaagaaaaactaggcttcacacgatacgaacaatatttgcagaagttccatttctatgacaaaacggggattgacttgccgaacgaagcgtctagcaaaatcaattatagatacgaatatgacaaagcatcgacggcttatggtcaagcgtcagccatcacaccgattcaacaaatcgaagcagccacagcgatagcaaacggcggaacaatgatgaagccatatgtcattgaccatattacagacccgaatacaaacaaaacgattttgcagcacgaaccaacagcagcaggaaaaccgatttcatctgatacagcgaagcaagttcgcgacatattaggtgaggttgtttcctcaaaaattggaacaggtcagccttaccaaatcaaaggcttcgacgttgctggaaaaacaggaacggggcaaattggcggtgccggcggttacctccaaggaagaaacgattacgtcttttcatttatgggaatggcgccaaaagatgatccgaagctgcttgtttatgtagctgtacagcagccgcagctgtctgaaacagaaacagggtctgccccggtttctcaaatctttaaccctgtgatgaaaaatagtctgctatatttaaatattgcaccaacaaaaacagacgataaaaaatcaggcgcagaaaaagtgaaacaagaaacgatgccttcattcctggatttagaagtgaagcaggcggaaacagaagccaaaaataaacacttagcgcctgttgtcattggagacggcctctccattaaacgccagtggccgagtgcgggctctgaattctctgaaagccagaaagtcttcttgaaaacagcagggaaaaccattaagatgcctgatatgacaggctggtccagaagggaagtccttcaatatgcttcgatttccggtgtgcatatagaaacaaatggacaaggatatgctgtaaaacaaagtgtcaaaagtggagcggagatttcagacaaagtcgtcactgtgacatttaaaagcccaaattaactttaaacctagcaaaccgcttgctaggttttttcttttgctccagctgaatatcacgtagcgttctacaaaaggacgggcctgcatatgatgaaaacaagccatatgtaaggagtgaaccgggcgtgcgagtgtcaagtgtaacagtgagaaaacgattgcttttcgtgctgctgtttggggtgatcatttttttcatcatagatactagattaggatatgtacagtttataatgggcgagaagctgacaagcttagcaaaagattcatggagccgaaaccttccattcgaaccggaacggggagatattttggaccggaatggggtagagcttgcgacgaacaaaagtgccccatctatattggtcgtccctcggcaaattaaagatcccgcagaaacaagcaagaaattggcagcagtactgaatatgtctgaagagaaagcgtacaagcatgtcacgaagaaaacatcaattgaacgaatttctcctgagggcagaaaggtatctcatgaaaaagcaaaagaagtaagagagcttgatttagaaggcgtgtatgtagcagaagacagcatcagacattatccgtttggcagctttctttcacatgtactgggctttgctggaatcgataatcaaggtttacttggactggaagcctactatgacgatgatctaaaaggcgaaaaaggttctgtgaagttttattccgatgcaaaagggcagaaaatgccagatgaagcagacgattatacaccgcctaaagatggtcttgatatgaaattaacagtcgattcaaaagtacaaaccatcatagaacgagaattagacaacgcgcaggcaaagtataatccagatggtatgattgcgattgcgatgaatccgaaaaatggtgaagtgctgggaatgtcaagcagaccagattttgatccagctgactatcaatcagttgacccaaaagtgtttaaccgaaatcttccggtgtggagcacatatgagccgggttcgacgtttaaaattattacacttgcagcagcattagaagaaaagaaagtaaatttaaagcgcgattcattttttgacagcggatctgtgacagttgatggtgcaagacttaggtgctggaaaaaaggcgggcacggatcacagtcattcttggaagtggttcaaaattcctgtaaccccggctttgtagagctaggagaccgtcttgggaaagataaattattttcctatattaaaaatttcggatttggccaaaaaacaggaatcgaccttcaaggggaagggcgggggattttgttcccgcttgatcgtgtaggtcctgtagagcaggcgaccacggcctttgggcaaggtgtatctgttacgccgattcagcaagtagctgcagtagcagctgcggtaaatggcgggacactttacacgccttatattgcaaaagaatggatagatccaatcacaaaagaggtcgtgaaaaagcaatcaccgattgccaaaaagaaagtgatttcagcagagacatctaaagaaatcaggtttgcacttgaaagtgtagtcgcccaaggaactggccgaaatgcatttgttgaagggtatcgggtcggcggaaaaacaggaacagcacagaaggtaaaggacggaaagtatatggagaataaccatattgtgtcgtttatcggatttgcgcctgcagatgacccaagtattgtagtctatgtggctgtggataacccaaaaggcaccattcaatttggtggtaccgtggccgcaccaattgttggtcatattatgcgggacagcctgccagagatgggtgtgaaaaaaagaaaagggcaaattgaaaagaagtaccagtggctggacacaaaaaccattgaagtaccgaatcttgtaggaggatctgtttcagatcttgaaaccctcttgatcaacctaaagatcgatgcctcaggaactggcagtaaagtagtgaagcaatcacctgctgctgggacaaaggtcaaagaaggctccacgatcagattatacttaaacgatgaataataaagaatgaacagagggtagccgcactcattcggctgcctctttttgttgaaagagaagaaccgtttgaaaaaaagagtccaaagtgtgttttttccaacagaaacttaaggaatacgctggatgtatccttttttttacgataaaatatagactgtgtgtttttttcacaagacatgcacgtgaacgaatttgagaggtttgatatgaaaatgaaattacaagaactgcttacatactttaaaagtgaaaacaacgaattgataaacgaaaatcctgatatcacttccattgaaatggattcaagagaggtgaaaaagggaagcctttttgtctgtataaaaggctatacagtagatggacacgattatgctgaaaaagcggtgaaaagcggggctgcagcaattgtagcggaacaccctcttaacataacagatgtaccagtcattattgtgaaacactctcaaagagcacttgcaagaatagctgatgcgttttatggacagccaactcataagctgaatctcatcgggatcacaggcacaaacggaaaaacctcaacaacacacatgatcgaacaaatgatgagaaaagccgagaagaaaacaggcttaatcggtacgatgtatatgaaggtgaatgatgacattctcgacgtgaaaaacaccacacctgaaagtgtcacacttcagaaaacgtttaaacagatgcttgatcaagatgtagatacagccattatggaagtatcatcacatgcactccatcttggcagggtgcatggatgtgattatgatattgctgttttcacaaaccttacacaggatcatcttgactaccacaacacaatggaagaatataaacacgcgaaaagcttgctattttctcagctcggaagcgcctttcatcacaataaacccaagcatgcgattttaaatgcagatgatgaggcttcgagttattttgaaaaagtcacagctgctgaagtcatgacctatgccttagagcaaaaagcagatgtcatggcaaaaaatattcaaatcatgccgaagggaactcaatttgatttggtcactccaattggcaccaagaatgtgacggttgccctcgtcggaaagttcaatgtgtataatatcctggcagctgtatcagtcgggatcgtatctggcttaacgtttgagtcgatcgttagtgcgattgaagagttggagggagtcaaaggcagatttgaacttgtaaactgcgatcaagatttccctgtcattgtcgattacgcgcatacacctgacagtttagaaaatgtcctcacaacgtgtagagaattaacagagggcaaaattttctgtgtgattggctgcggcggcgaccgtgataaaacaaagcgtcctcaaatggcccaaatcgctgtgaaatatgcagatgaacctgtatttacatcagacaacccaagaagcgaagatccttcagccattttaaaagatatggaaaatggggtgccagacgcgtattatcatagctttgtgaatcggaaacaagccatcttctttgccattgccaatgcgaaaaaaggcgatacagtcttaatagcgggtaaaggccatgagacatatcaaatcattggcgatcaagtctatgactttgatgatgcaaaggttgcagttgacgctattttagatctaaacaaatcttaaaatgatgaaaagagtgtaatgaaatgaagcattttgtacaaaaacaacatacgaagaacgcgaatgaataccataataatgaatgcaattttctgatggaaaacggctttggaaattcggaaggagtaaagaacgatgcttgaacaggtgatattgtttacaatcataatgggatttttaatcagtgttcttttatccccgatttttataccgtttttaagaagacttaaatttggtcaaagtattagagaagaaggcccgcagtctcaccaaaagaaatctggtactccgacaatgggcggaattatgattatcttttctatcaccattacaacgattgtgatgatcaacaaattctctgagattagtccagaaatgtttttactgttatttgtcacacttggttacggcctattaggatttttagatgattatattaaagtagcgatgaaacgaaatcttggattaacatcgaaacagaaattaatcggtcaaattgtgatcgcagtgatcttttatgcagttttccattattatcagtttgcaacgacgattcgcattccaggaacagacgtcagctttgatttaggatgggcttactttatccttgtcgttttcatgcttgtcggaggttctaatgccgtgaacttaacggatggactggatggtctcttatctggaaccgctgctattgctttcggagcttttgccatactggcttggaatcaatcccagtatgatgtagcgatcttttcagtagctgttgcaggagccgtccttggtttccttgtgtttaacgcacatcctgcaaaagtatttatgggtgatacaggttctctagcattaggcggagccattgtagcaattgcgattttaacgaagcttgaaattttacttgtcattattggtggagtatttgttgttgagacgctatccgttattcttcaagtgatctcctttaaaacaaccggcaaaagaatctttaagatgagtccgcttcaccaccactatgagttagttggctggtcagagtggagagtagttgtcaccttctggacagctggtttattacttgctgttttaggaatttacatcgaggtgtggttataattgaataagatgcaaatgttaaaaaacgaacatgtactagtattaggtcttgcaaaaagcggatatgcggcagcttcaattcttcatgaacatggagtaaatgtgacggtaaatgatcaaaaaccgtttgaagaaaacgaacctgctcagctactttctgaaaaggggattgatgtcgtttgtggcagtcatcctcttcgtatattcgaagataaagaaattacgattttaattaaaaatccaggaattccatatgaaaatgtgatggttcaagaagcgcttcgccgccaaattccagtttggacggaaatagaattagcgtatcatttaacctcatcctcttttattgggattactggatcgaatggaaaaaccactaccacgactttgatttatgaaatgctgaaaaaagacagccaaaaaacattagtggcgggtaatattggaacagttgccagcgaagtcgctgcaaatgcagctggcgatgagtggatcgtaacggaactctcttcttttcagttaatgggaacagttgagtttagacctaaaatcagcttaatattaaatatttttgatgcacatttagactatcaccacactcgtgatgagtatgaaaaagcaaagcagaaagtattcgcacatcaacatgaagatgatatcgctgtaattaacctagatgatccatcggtcgtaaaactggcagaaggttcaaaagcaaaaaaagtgtttttctcagtgaaagagccagtagaacatggtgcgtttattcaacatggtgcaatttattacatgaatgaacatatcattgatgtaaaggatgttgtccttcctggtgagcataaccaagaaaacattctggcagctatttgtgttgtgaaaaatgcaggctgctcaaatgaagcaatcgtacacgttctcacgacatttagtggagtgaagcatcgtctgcagtttgtagatacaattcaaagtcggaaattttataacgatagtaaagcaaccaatattttggcaacaagtaaagcattgtcagccttcgaacaaccgaccattttattagcaggtggacttgatcgcggcaatgaatttgatgaattgaaacctttcatgaaaaatgtaaaaggaattatcacatttggtgagactgcacctaagtttgtgaagcttggtgaagagcttggaatacatcacgtaaaacatgtcgataatgttgaacaagcagtacctgcggcgtttaacatatctgaagaagaagacgtgattttattatctccggcttgtgcaagctgggatcaacataaaacatttgaagaacgtggagacatgtttgtaaacgccgtgcatatgcttaaataagggcttgtctctcatatgactgacagcccaaatgaaattatgcttggggtgtcggtctcttgacgaataagaaaacttctccggattttttgcttgttgtcattacgttacttttattgacgattggtttaattatggtgtacagcgctagtgctgtgtgggcatcgtataaatttgatgattcgttttattttgcaaaaagacagcttttgtttgccggaatcggagttatcgcaatgtttttcattatgcgagtcgattattggacgtggcggacttggtcaaagatattgattgctgtttgttttctccttttgctgcttgtactcattcctggtatcggtatggagagaaatggatcaagaagctggatcggtgtcggtgcgtttagtattcagccctctgaatttatgaagcttgcgatgattgcgtttcttgcaaaattcttatctgaaaaacaaaaaaatatcacatcctttcgcaaaggttttgccccagctttaggcattgtattttctgcatttgccatcattatgcttcagccggatctgggaacaggaacggtgatggttggaacctgtattattatgatatttgtttcaggtgcgagaattgctcactttatatttctcggtcttataggactcagcgggtttgctgcacttgtcttatcagcaccctaccgaataaaacgaattacatcgtacttaaatccttgggaagatccgctaggcagtgggtttcaaattattcaatccttatacgctgttggtccaggtggtcttttcggaatgggacttggtcaaagtagacaaaaattcttctatttacctgagccccaaacggacttcatctttgcgatattgtctgaagagcttggctttatagggggatcactcattttactcctctttagtgttctattatggagaggcatacgaatagcacttggagccccagatttatatggaagtttcctggcagttggtattatttcaatggttgccattcaagtaatgattaacatcgcagttgtcactggacttattcctgtgacaggtatcacgctcccattccttagttatggcggctcatcactgacattaatgctgatggcgattggcgtacttttgaatgtaagcaggtacgcaagatattaacgtgctgaagctcatgaaaccatgttgacgtttattttgcaaaagtacaaaaaaatgatttgaagagtgaaaatgacagtttttgtttcgaaaacgtgttttttgactcttctttacaggttttaacggagccctgttgtttaaaacagggtttatactttgttcagagcagaaaaaaattgaggggaaatggtataatgcgtatagtaatcagtggaggcggaacaggcggacatatttatccggccttagcctttattaaagaagtgaaaagactgcatcctgatgtggaatttttatatatcggtactgaaaatggacttgaaaagaaaattgtagaaagagaaaatatccctttcaaggcgatagaaatttcaggttttaaacgaaagctttcctttgataacgtcaaaacggtgatgagatttttgaaaggcgttcaaaaaagcaaatcttacttaaaagaattcaaacctgatgcggtcattggaacaggcggttatgtgtgtgggcctgtggtttatgcggcttctaagctgaagatcccgactattatacacgaacaaaacagcctgcctggtattacaaataagttcctagcgagatatgttaataaagtagccatctgctttgacgaagcaaaggcacattttccttctgaaaaggttgtatttacgggaaaccctagagcctctgaagtcgtctctataaaagaggggaaatctcttaaagaatttgggctcgatgaacagaaaaaaacggttcttattttcggcgggagccgaggtgctgctcctatcaatagagcagtgatcgaaatgcaagatgatttaaaggctaaaaactaccagcttttatatatcacaggtgaggttcattatgaaaaagtgttgaatgagctaaaggaaaaaggtgcagcacctaatatgatcacaaaacctttcttgcatcaaatgccggagtacctgaaatcgatcgatgtgattgttgcaagagcgggagctacaacaattgctgaagtaacggctcttggaatcccaaccatttttattccgagcccatacgtgacggcaaatcatcaggaaatcaatgcaagatcacttgaaaaacatgatgctgcgattgttttaagagaatcagagctttcaggggatcgtctgctgcatgcaattgatgaaattgccggtaatgaagaaaaactcaaccaaatgagccgtttaacgaaagaactcggagtaccagatgcggctgcacgtttatataatgtgttaaaagatattacgactacatgatggaatgatattaggtaaggcggagggtaatatggagaacttgaagaatgaattattagaagcgcaagttggtaaagtacttgaaaatgagccgcttgctaatcatacaacaatgaaaataggcggaccagcagatcttttgatcatcccaaaagatatcgatgcagttaaaacgatcatggatcaggtgaaaaaacaccatacgaattggacggtcattggaagaggatcgaatttacttgtacttgataagggaattcgtggagttgttctcaagctaggtgctggactggatcacctaactgtaaatgatgaagaaattacagttggcggcggctattctgtcgtaaggctcgcgacatctcttagtaagcagggtctttcagggttggaattcgcagctggtattccagggtctattggaggcgctgtttatatgaacgcaggtgcacatggatctgatatcagtaagattcttgtgaaagctagaatcttatttgaagatggaagcatcgagtggctcacaaatgaacagatgaatttcagctatcgaacatcagtccttcaaaaggaacgacctggcattgttctcgaagccgtgtttaagctcaaacaggatgatcgcgaaaaaatcacaaagaaaatgcagcaaaataaagattatcgtaaagaaacccagccttataaccggccatgtgctggcagtatttttcgaaatccgctgcctgaatatgcaggacagcttgtagaaaaagcgaatttaaaaggataccaaatcggcggagctagaatttctgatatgcacggcaactttatagtcaacgctggtggagctactgctcaagacgtgctggacttaattcagtacatccaaaagaaaattaaagaagactacaacgtagatatgcatacagaggtagaaattatcggtgaagaaaattaacagctagtttttatgaatgatggcatcacaggaaaacaaacggcatgaaagaatgccgtttgttttctcatcaaaatgatgacccaaaggtgtggacaagcagctttgaatgaggtgaagagtatatatgcggcctgatcatgaaaatgaaaagatcgtcaatatagaagagcgaattcctaaaattaaagaacaaaggaagcaaaaagcgaatcgtagactgatctcttttatactactgttttttatcatggttttaattattatttatttgcaaacaccaatcagcaaaatttcttctttaaccatcacaggtaacgagcatgtctctacaaaacagcttgttaaactttcacaaattaaagaaggcgaaacagagttttggaatttaaataaagatataacagcagatcatattaaacaaaataaactgattaaaagcgttaggatcaaaaagcatttcccaaataaggtcagtattgctgtcaaagaatatgcaaatattgcgtatcttcaaaagggaaatctatattatgagcttcttgaaaatgggaccgctttaccagaagaagttacaccgagtcatgcaggacctatttttgtcgattgggacaacaaggaaaagctgaagcaaaccgttagatctttaaatcagctgccagcctctattcaggaactcatctcagaagtatattatgtgccgacaaattcaaaccagtggctagttaaattttatatgaatgacggaaacactgtgattgcatcaattaaaacattcggtgataaaatgaaaacctatccagccattgtaaaagaactttcgtcttctgaaaaaggcacaatccatatggaagtcgctacgtattttgaagcgtttaaatctaagaaaaaggaagatgagcgttgagaggcaaaacagttatattctcaattgtcatgcttgttcttggttttctgatttctttttcataccaatatacaaagcagcatcaggcagatgtcattcgaacagagcaatggaaaaaagaatactctctgaaaagtcagctcacaaagcaagaaaaggcgaatcagaaactcgaaaaagaattatatagtcttcaatcaaaggttcaagcgacagagtccaatttgaaaaatgaaaaagagcagtattttaatgtactggaagatgttgagaaatacagaatgtttacaggagagattggtgtaaaaggaaaaggggtcaaagtatctcttgaagatgcatcttatatcccgagtggacaaaatgtcaataattacattgtgcatgagagccacatttttcatgtgataaacgaactatttatatcaggggcttctgctgtatctattaatgggcaaagaatcacacaccaatcatacatacattgtaatggtccagttgtcactgttgatggtgttcagcatccagcaccatttgtcatttctggtattggagatccggctgtgttaatacctgctttaaatattgcaggaggagtggtcgatcagctgacaagtgatcacatttcaatgacgattgagaaaacggatattcgtatgaaccctcttttaagaaacaaagattaaaagtgaaaaggtgagtggtgttgaggaaaaagaagcctttacttagtttaacagctttaatgatcatatttggcatcatggtctccatccagtttaattctttacaaaagcccaaagttcgtgatactcgtgatgtttgggaactgagagaggatttatctgcatctaaaagtaaggaattggatttgctcaaagaaattgataaatacgacgagatgctaaaaaaatatggtcatcaaggagatcaatcaaaagaagcacaattaacaaaaacgttaaaagatttaaaagaaaaggctggttttacagaagtggaaggggaggggattgaaattgaaatttctcagcttttttcaaaggaccttaccggagaagaagtgaaaaatatcccgcctgatcttctgaaaaagttaattaatgaagccaatatgtttggggcaaaacatatttccatcaatgatcgccgtgtaattaatacaagtgtgattcgagatattaatggcacgacaaaaatagatggttacagcttagatagtgatgaagtcaacattaaaatgattagtgagcaggccgacaaattatacagccgtttaaatgtatcagatattggtgatttgtttgctcaggaaaacttcagcttgagtatgagccagccgaagaaaaaaatccatttaaaagcatatgacggtgcaattcaagtaaacgaattgaagcctcttgaagatgtaaaggagggaaaatcttaatgtggcttcctgtacttggcttaatcataggagttgcgatcggtttcttaacaaattttacgataccgaatgagtattctaactatctttccctcgctgtacttgctgcgcttgatacattgattggtggaatccgagcacatctgcaaggggcatacgatgaactagtgtttgtatcaggcttcttctttaatattatactcgcaataagtttagcttttctgggcgtccatcttggtgtagacttgtacttagtcggaatgtttgcattcggcgttagattgtttcaaaatatagcagttatcagaagaattctactaacaaaatggacaatttcaagagaaaaaaagaaaaaaagtgagtcataaaaaaggatatacatatgatgtaacgaatattttcagtaatcctaataaaaaatgttgattttttaagttttgttacacacttgtaaaaacacattcattgtattgttgttcagcaaataatagaatagaaagtattgatatgtgaggaggtgccatagaatgaacaacaatgaaatttacgtcagccttgacatcggtacatccaatataaaagtcatcgtcggagaaatggcggatgattcgcttaacattataggtgttggaaatgtcccttcagaggggttaaaaaaaggatcgattgttgatatagatgagacagttcattctattagacaagcatttgaacaggctgagagaatggtaggatttcctttacaaaaggcgattgtcggaattaacggaaaccacattcatattcagaatacgagcggcgtggtcgcagtatctagtgaaaacaaagaaatacatgctgaagatgtgagacgtgtcttagatgcagcacaagtagtatctattcctcaagaatatctcgtcgtagacgtgattccgagacaatttatcgtcgacggaagagatgagatcacagatccgaaaaaaatgcttggtgttcggctagaggtggaaggatcgttaattacaggttctaaaacgattctacataactggctccgatgtgtagaaagagctggaattgaaattatggatatttgcttgcagccaatcgcatcgggctcagcagcattatcgaaagatgaaaaaaatctcggggtagctcttgtcgatattggcggcggatctacaacgatttccgtatttgaaaacgggcatctctattctactcacagtatccctttgggcggagagaacattacaaaagatttgtctataggacttagaacttccactgaagaagctgaacgaatcaaaaaacaatttgggcatgcgttttatgatgaggcatcgactgaggagacatttgaagtttctgtgatcggtaccgatcaaaaacaaacgtatacacaacttgatgcggctaacattattgaagcgcggctggaggaaatcctgctctttgtggcagaggaattaagaaatatgggtgtccatgatttgcctggtggattcgttctaacaggtggacaggcagccataccaggtatcctttctcttgcacaaacggtcttgcaaaacaatgtcaggattgcaagtcctaattatatcggggtgagagagcctcaatatatgacaggagtgggtctgatccactttgcttatcgcaatgcaaagattcagggcagacaggttggattccaaatgccagatgaggcgtttcatgaagtaggcgcatccatggagccggtttcttctgcaccacaagtgaaagaagcgcagccaagaccgaaagtaaaacaaaaagcacaacaagagacaaataaaaaaccgggcaaaatgaaaaaactatttaatatgttctgggaatagaattagattttcgacggattaggaggattcagcatgttggagtttgaaacaaatatagacggcctagcatcaattaaagtaatcggagtaggtggcggcgggaataacgctgtcaaccgaatgatcgaaaatgacgtacaaggtgtcgattttattgcagtcaatacagatgcacaggcgttaaatctatcaaaagcagaaactaaaatgcaaatcggtgctaagctgacaagagggcttggagcaggtgcgaatcctgaggtcggtaagaaggctgctgaggaaagcaaagagcagattgaagaagtactaaaaggtgcagacatggtcttcgttacagctggtatgggcggtggaactggtacgggtgctgcacctgtcattgcaaaaatcgcaaaagattctggtgcattgacagttggagtcgtgactcgtcctttcacatttgaaggaagaaagcgtcagcttcaagcagttgaaggaattgcttctatgaaagaagcagtggacacattaatcgtgattccaaacgatcgcttgcttgaaattgttgataaaaacacgccaatgctggaagcattccgcgcggcagataacgtgcttagacaaggtgttcaagggatttccgatttaattgcaacaccaggtctgattaaccttgactttgctgacgtgaaaacaatcatgtccaataaaggttcggctcttatgggtattggtgtcgcaacaggtgaaaaccgtgctgctgaagcagcgaagaaagccatttcttcaccacttctagaaacagcgatcgatggtgctcaaggcgtcatcatgaacattacgggtggcacaaacctaagtctttatgaagtgcaagaagcagcggatattgtggcttctgcatctgacgaagatgtaaacatgattttcgggtctgtcatcaatgataacttgaaggatgaaattgtggtgactgtgatcgcaactggatttattgagcaagagccagaagtgacaaaaccacaaagaaatccactaggacaaggattaaagcaaaatcaatccattcctcaaaaacgtgaagtaaaacgtgaggaacatcagcagccatcatctcagccgagacaaaatacacaatcaagtgatgatacgctggacattccaacgttcttacgcaaccgcaataaacgctaatcgagtatagcttaaccccttccattggaaggggttttttcatgtctcaacgtataaggggactctaatcaaaaagtcttaaatgtgtgagagccacttcatctttcatatgtaatttgacttaaggtgcttaagaaaaaagaatcatttttaatccctcttacaaaaaacgacaagatgatgacctttatttgactacattaaaaagaacaccatgaatcttgtcatgaacaaaagaaggaaaggagtgagacatatactctgtttggccatttgaggaggagggatttgattgaaattgaagtttcgcaaaaccgccggctatcgtttgatgagtcttttggtgataggtactttaacgatgacaagctttgggatggttcaagcaaaatcgacttctacctcatatcaggaggaagctgtttcctctaagacaacaaaagcaaagatctcatctagattaatgaaacagtttcaacaggatgacaaggtgacctttttaatcaaaatgaaggagcaaacaaatacgcaaaaagtggcgaaggaagctgtgtccagagccaaaaaacagaaattaacagcggctaaaacgcagtacacaaaaagatcagccgtcgtatcagaattaagagcaacgtctgaggagacgcagcaagcgctgcttacgtatttacaaaaggaacaaaagaaaaagcaagtgaaggagattcattcgtactatattgtgaatggtctagcggtgacgggaacgaaagaagtcatggaaaaggtggcttccttcccagaagtagatcaagtgctgccgaatgaaacccgtcaaattcatcgccccgttgatttgaagacgtctaagcagaaaaaacaaatgaaagcagtagatggagtcgagtggaacatttctcaagttcatgctccagaagcgtgggctttaggctatgacggtactggtactgttgtggcaagtattgatacaggagtggaatgggatcatcctgctttaaaggaaaaataccgcggatttgatccagcacacccgaatgatccatctcatgaattcaattggtacgatgctacaacaggatctgaagcgccatacgacgatttagagcatggtacacatgtgacggggacgatggttggctctgagccagatggaaagaatcaaatcggagtcgcaccaggcgcaaaatggattgcggtgaaagctttctcagaagatggtggttcagatgctgatctgcttgacgcaggagagtggattttagcaccaaaagatgaggacggaaacccacatccagaaaaggcaccagatgtcgtcaataattcttggggcggtgggcctggtcttgatgattggtataaagatgtggtcaatgcttggagagcggcggacatcttcccagagttttcagctggcaataccgatttatttaaccctggtggtgagggatcaattgcaaatcctgcgaactatcaggaggcctttgcaacgggtgcaacggatcaagacaacaaattggggtctttctcgctgcaaggtccgtctccatatggcgtcatgaaaccagatattgcggccccaggggtaaacattcgttcatccattccagggaaagggtatgaagatggctggaatgggacgtcgatggctggtccgcatgtttcagctgttgtggctcttcttcgccaagtacagtcagatctttctgttgaagagattgaacaaattctcattgatacagcgaagccgttgactgatcagcaattcccggaatcccctaacaatggctatggggcaggtttagttgatgcaaaagaggcgattacggcattaacagatggaattggcacgattgaaggacaggtgacaaacgaagatgttaatttaggtgatatgaaaataacagatcaagccctgcctcaaaaagaaaaggctgtacatccacataagaagcctgcaaaaacaaaagaattgaaaaagggaaaaaatcttgatgctccgtccatcaaagctcttcctatgaaagcggaaattagtgttcttgaaagcggaaaatcaacgtacacagatgaagcgacagggagatatcagcttactcacagtgcaggggaattcacagtgaaagcggaagcttacgggtttgaatcacgcaaacaaacagtcaatatttcttcaaatgaaacggctgaggcaaatttcgccttacagccacttaagaaacgaacgatatccggtacaattgtcaatgaagcaacgggtgaaaaagtaaaggatgccacggtttatcttgtagaggatgcgaaaattaagccggtgaaaacagatgaagctggcgaattttctctagaggcattgagcggtgtctataccgtcaaagtatttgcgaaagggtttaaaggttattcttttacagcagatgtgacagaaaagccggttaaaaaagccattcagctggagccattcatcggctttgctggtgaaattggctacgatgacggaacagctgaaaatgcgcgagccttctatgatcctggcaatggctgggctgtgaagttttcattagaaaaggggaagaaacaagcgcaactcacaggggggcttttccgtttctggtcatcagagtggccagctcctggcgggaatgaatttgcggttgaggtgtatgatgcttctgggaagaatggagctccaggggagaaaattgcaggacctctaaaagcgaatgcgctgcgtaatggtgaatggacaaaagtagatttagaagatcaagccattacggtggatggagatttctatcttgtctatattcaaacgaaaaagaatacggagtctccaggacttgcaacggacgaagatggtccaaatgctgaaagaagctggcagctgacaagcggtgctttttctccttctccaaaagaagaagggaattatatgattcgggcgcttgttgactatgaagcagatgtgccagagattatatctccgaaggcgggaaccatttcgaacaaaggtgaactggagattgaaggcaaagcctcccctgggcttgatgtagcgatttatcaaaacgatgaagagattgccaaagtgaaagcagatcagtcaggcgctttcaaagaaaaggtcacagtttcaagtggagagcatgtattcacagctgcgactgttacggataaaggcgcaacgaaacgatcaaaaccagtaaaggtcatcattgatcaaacagctccagcactcaccatagatacacctaaaaaagggggaaagtctaataaagaatcactcactgtagaaggaaaggtcacagatgatcatcttgatcaagtcactgtaaatggaaaaaaggcaaccgtaaaagatggaaaatattccgcaagaatactgcttgagaacgggaaaaatacaataaaagtaacagcgaaagatgcagcaggaaacaaaacgactaaaaaagtcaatatcgatgtccaatacgaggcacctgaaatttctaagctgactccagcagagaatgtccatctatcatcaggagagtctgttaaaatttcatttaacagcagggaaaagctagacgcaacgtttgttattcacatgccgctgacaaacgcgagatcaaagcttcaaaatacaacagagctgccgcttcgcgaagtatctagcggaacatatgaaggctactggacagctacttctaccgccaaagcaaaaggtgcggtcattgaagtaattgtgcgagatgattatggaaatgtcacaagacaaaaggcttcaggcacattaaacatcaatgaaaagtaacttaaacaaaagacacgatttccaggagcgtgtctttttttttcgagcaattgtttgaaagcttgtccagaagaacactctcttgcttcgcgctctcattcctcgacaaaaacaataacaatccaccaaaagttctctatcatccccaacaagaattgacagacttccatctcttgactgttttatactggtacaaacaagtgcaagtactgcttttgattctttgtttcagatgaaaggagcagaaggtggtcatttatttagatgtgatctggctgttaaacttttgttttgatctattgcttctcttactcactgcatttattctcaaacgacaagtaaaaaaaaggcgatatatgttaggagctctcattggatcgagcattgttctcttgctctttacaccatttgcaatggttgtgtcacaccctttaggcaaactatttttttctgtcttcatcgttcttgcaacctttggttttcaaagatttcgttccttttttcaaaatctgtttgctttttactttgtaacatttttgatgggaggaggcatgatcggggttcattcgtttttgcaaaccaacacagtgatccaagatggcctgctcatttcacaaaatgatggctttggtgatcccattagctggctttttgttttaaccggctttcctgcgatatggctgttttcaaagaaaagattaggagaggttggtgcgaaaaaaagacaatatgatgaacaagtgcttgtagagatacacattcacggggagaccatccgcttaaatggactcgtcgattctggcaatcagctgtatgatcctatgacaaaaacacctgtcatgatcgtccaggccgatcagctaacggccatttgcggagagccatttatagagctcatgaaacagtctcatcctgttgaagtgatgcaaaagatcgatgatcaatttcctcttcttgatcgattaagacttgttccatatcgagcagtcggtcatgatcacggttttctactatgcttaaaaccagatacagtcttcatttattcaaagacgcttatgattcagccagccaagtgttttgtagggttgagtctgagcggtttatcagcagatcaggaatttcaatccatcattcatccagatatgttagacgggaaaatcatccagggggtgtcgtagttttttgtgatgtcttttatcttacgaggtcaacttgacatttagaagggagaagaagatgaaaaaattaaaatttaaactcacttactactggtataaactcctcatgaagctaggtctaaagagtgatgaaatttattatattggtggaagtgaagcgctgccgcctccattatcaaaggatgaagagcaggaactgcttgtcaaattaccaaaaggtgatcaaaccgcaagggcgattctgatcgaaagaaatttgcgtttagtcgtttacatcgcaaggaaatttgaaaacacaggtattaatatcgaggatttaattagtatcggaaccattggcctgatcaaagcagtcaatacatttaaccctgaaaaaaagatcaagctggcaacatatgcttcgagatgtattgaaaatgagattctgatgtacttgaggcgaaataataaaatccgttcagaagtctcgtttgatgaaccgctcaacattgattgggacggaaatgaactgcttttatcagacgtacttggaacagatgatgatattatcacgcgggatattgaagcaaatgtagataaaaaactgctgaaaaaagcgctggagcaattaaatgaccgcgaaaagcagatcatggaactgagatttggcttggtcggcggtgaggaaaaaacccaaaaagatgtcgctgacatgcttgggatttcccagtcgtatatttcgaggcttgaaaaaagaatcattaaacgattacaaaaagaatttaataaaatggtctaaaaaaattttttgaaagctcgatccctgtactgccaaagggataaccattttttcacatgattctcgtcatcgctcgtgcatatttttccatcccaaggagatactgaactttgtacaacagctcctgtagggagggaaaaaagtgtccagaaataaagtggaaatctgcggagtcgacacctccaaactgcctgttctgaaaaacgacgagatgagaaaattgttcagacagctgcaagatgagggtgacgatacagcaagagaaaagctagtcaatggcaatttacggttggttttaagtgtgattcagcgttttaacaacagaggcgagtatgtcgatgatctcttccaagtaggctgtatcggattaatgaaatcaattgataattttgatttaagccacaatgtcagattttcaacttatgcggttcctatgatcataggagaaatccgtcgatacttgcgtgataacaacccgattcgggtgtctcgttcactaagagatattgcctataaggcacttcaggtccgtgagaggctgattagtgagacaagcaaggagccaacagcagaagacattgccaaagtgctggaagtgcctcatgaggaaattgtctttgccctagatgcgattcaagatcctgtatctttgtttgaaccgatctataatgacggaggagatccgatttatgtgatggatcaaattagtgatgaacggaacaaagacacacaatgggtggaagaattggccttaaaagagggcatgcgcagattgaacgacagggaaaaaatgattcttcgtaaacgctttttccagggcaaaacgcaaatggaagtcgctgaagagatcgggatttctcaagcacaagtctcaaggcttgaaaaagcagccatcaaacaaatgaataaaaacatcttttaaagccgccgcttgatgtgcggcttttttcattcttgttagagaacacgcctctagtattgactcggttatttttttcatttaatctgtttttaacaaatgttattttagatatcatttgttagggaacacttaagcggaaagaagggttattatgacattccatgatgaaagaaggctgctcattaaggttgcgcatatgtattatgaagaaggcgccacccaatctaacattgcagaagctgttggggttagccgttcgctcatatcgaaatatttggcaaaagcacgtgaagcaggaatcgtggaaatcattattcatgatgaagtcaatcaacagtatggatcgttagaaagaaaaatagaacgcaaatatgggctgcgagaagtcgtctgtgtggaaacgcttagcaaagacacaaccaaaagccgaatcggtgccgcggcagcaagctttttattaaaagtgatgaaagatggacaagtcatcgggttttcctcagggacaacgctgcatgaaatggcgaaagcgcttacctctgttcagcactatccatccgtgacatttgttccgcttgtcggaggtgtgggaaatgaagatgtcgatatccacgctaactatattattgcgagatgcacagaggcactcaaatctaaatgtgagtttttacatgtacccgtcatgcttgatacgaaagaagcgaaagatgtactgatccggcagccgtcgatcaaaaaagtgattgaactaggagaatcatcaaatatcgcggttgtcggaattggcggtgttccgcagcattcaacgatggtgaaatcttatatgacaagcggcgaggaggacatccttcaagcgaaggatgtagcaggtgacatttgctataactttattgatcatcaaggggaagtatatccccacccatggaacgaccgggtgatgggcataagcccgcaaaagctgaaagaaattccgcttgtcataggtgtcgctggtggcgaagagaaaattgaagcgatccgggcggcattagcaggtggattaattcatgtattaattaccgatgaacgaacaggagatgccttattaaagtaactacctaatatcattaggtagtcagcgtgtagacaaaccctcgcattcggtgtcagtcctgcgtgccggtgctcacgaatatcaaattcgctccgctccggtactcgtccttcctagactgcaaaggttttctatcacgctgaaaagaagacaaaaggctaaaatgaagatcattttagccctttgtcaagaatctgtaactacctaatatcattaggtagtttttttgagtctaaagactcaaaaagattgaaaattttatcgattttagcttgacacaaagttgacacatcatataaactaagttcataacaaatgataaataaaataacaaatgttacaagaaacagatttttgttaatttttataacatttgttaaaagtttcagattatatttctagcaatctattgagaagcaagaaaacctgaaaggatgatttagatgtcaatctatcaacagttgttagctcgagaacgcagtggagacccgatcaaagtagggattattggagcaggccaaatgggctttggactcatttcacaaatttctaaaattccaggcatgattgtcgctggtgtttgtgatattcacctttgtgcagcagagaaggcagcaaatttctacaagcagcatgcgaagccgcatcaaatggttgtcacaaatgattacagagaagtgattcaatcagatttcgtggaagttgtagtagatgcaacaggtgtcccagaggtcggagcaaacatttctttggaagcgcttaattcgaaaaaacatctcgttcttttaaatgtagaagttgatattactatcggtttggtcatgcataagttattcacaaatgcagggcttgtttactcaggatcagctggagacgaaccagcagcaacactagaattatatgaatttgcgaaaacaatgggtcttgaggtgctcgttgccgggaaaggaaagaacaacccattcttcccagaagcaaatccagatacgtgtaaagcagaagcagatagtaaacatatgagtgcacatatgctggctgcattccaggacggcacaaaaacaatggccgaaatgaacttattaagtaatgcgacagggcttctgcctgataaagtcggtatgcacggagtcgaagcgaatttagagaatgtagcagataaattgaatcaaaaacagcaaggcggcgtgctggataacttcggagtcgttgaatatgtaaatggacttgcaccaggcgtatttgtcatcgtcaagagtgatcttgagccagtggatgaagaactgcgctatttaaaagttggaaaaggtccgcactacacactttaccgtcctttccacttagccagtcttgaaacacctgtcaccatcgcaaaagcggtcttacagcatgattcatccatccacccaattggtgtaccagtgtcagaaacagtagctgttgcgaaaagagagattaaagcaggggaatcacttgacggaattggcgggtactccgtaagaggtgtacttgaaacacatcaagacatgaaaacgaacggccacattccaattggcttaatcagcggaaaagtcgtagcgaaaaaagacatcaaattaggacaattcctgactcatgatgatgtagaacttgattcaaacacaacggtctggaagctgcgttcattacaagatcatttatttcaatcataaggacgtgaagctatggaaaaattagcaatcgtactttgtatcattctcattgtgcagtatgggttatcttttattcaaatcaagtactaccgcaagagcatggattcacttattgatgactacaaagggaagcaaggctatcacttgttttcgggaatggaacggcgcaaagttggccctggagccatagcgctcatcattgtggatgaatcttatatcattcaaaaatgccatgtgcttggcggtgtgtcgatcttatctaaatttaaagaagttccttcatatgaaggaaagcatgttggtgcagtgctagacgagcaccatatgatgaagcagacattgaaaaaacgcaaaaaggggccagctgtcatgcacgcactttccatggcggctgaacaagcacttgtctcgatttcgaaaaaaaatataacaaatgtgaactagagaaaggggagatgaaacatggaatggattcaatggtttggagagcactttatcggaatgtttgaagccggtggaaagcaattcatgggtcttgttacaggcatcgttccaacgcttgttgtgttacttactttcacttatgctgtcatgaagtttattggagaagagcgagtgaatagagcgatccagtttgcagcgaaatatacgattttgcgctatacgttaatgccgatcttatctgttcttattttgacaaacccaatggcttatacgtttggccgcttcttacctgaaaaacaaaaaccagcattctatgattcagctgtttcatttgttcatccggtgacatcactgttcccgtatgccaatgcaggagaactgtttgtctacttagggattgcaaacgggattaaagaagcaggatattcaatgtcagaacttgctgttcgttacttcttagtcgggatcgtcgtcattttacttcgcggtattattactgaatggattacaaaatacttagcaggaaaaatgaaagcgaattcacaataggggagggttagacatgacaaaccacaaagtatttgttgcaaaaggtgctggcggatggggaaaaggcttagagcttgaaccgactggtaaaagaagaaaggttgtttccattacagggggaggcattcacccagttgcacgtaaaattgcagaaatgacagggacagaagcatgtgacggctttaaaaactcgataccagaagatgaaatgatgtgtgttgtcattgactgcggtggaaccgcgcgaatcggactgtatccaatgaagcgcattccaactgtagacgttttggcttcctctccttctggaccgcttgcaaaacatattacagaggatatcttcgtatcaggcgtaacagaaaaggatatttcctttgcggaagcatctgatggtgaggcgaaagtagaaggtcaagaaaacagtgagccgattgacaaagagaatttcaaagaaacctattcaaaactgaaagaggaaaatatcgagcgtcaggaaaaaggtaatttcctcatgagattctcaagaggaatcgggaaagtcaccggtacgttctatcaggctggccgtgattccgttgatatgcttttgaaaaacattattccattcatggcatttgtcagtatgttaattggaattatcaattatacaaaaatcggtgacttgattgctcattttctatcgccactggcaggatctatatgggggctcttactgctcgtcgtggtctgtacattgccgttcctatcgcctgtcttaggacctggagcagtcattgcacaagtcatcggtgttctcattggtagtcaaattgcactagggaatatcccgcctcaatttgcactccctgcactatttgccatcaacggtcaagtagggtgtgatttcattccagttgggctgtcacttggtgaagcgaagccggaaacggtacaatatggggtaccagctgttttgtatagccgtctcattacaggggttctatctgttgtgatcgcatacgttgccagcttcggtatgtattaaatgtattaaaggaggaatcgagatacatggtaacacaatctgtcgtaaaagaaatcgggatcttagtcccgcaatttaaagaagataagctgattgttttatttggacccgcagcgccgcaggaattaagagatatgtccgtcattcatgagttcgaacatttagaagaagagccgctgaagctgggcggtaccattcaagtgggcgatcaaacgtacacgatcacagccctcggcaataaagcaaatgacaactttaaagagctcggccatatttcgatctacttccaagagccgtttgatgatgtattaccgggagctgtctttgcatctccgcacacgtttcctgatataaaagaaggcgtgcgaattgaaatttcgtagctataaagaaaagctgttctgtaaaaggagcagctttttttatgtgaggtttaccagaaagagcaattgcgatatgctgtaaacattcattatttgtttattcagaatttttactcagggggaaatgatggtgtcacttgaattgaaggatgtttctttaaaacgaaatgggaaatggctgctgcaatctgttgactggcaggtgaacaaagaggagcactgggtgctttacggtttaaatggtgcgggaaaaaccgctttattaaatatgctctgctcatattacttccccacgtcaggtgagatgaccgtgctgggacatgtctttggcaaggaggcgcttggcgaaaagctcaggaagaaaattggcctcatttctgcgggacttgaaaagaaactgcacagagacgacaatgcatttgaaatagttctcagcggagcatttgcttcgatcgggctttatgaaaccccgacagatgagataagagagaaagccattgatctattaaaagcatttggttcattcaaatatgcgaaccggacatatgaaacactctcacaaggagaaaagcaaaaagtcctgattgcgagggctttaatgaatgatcccaagcttctgattttagatgagcctgtgacgggtcttgattttttagcaagagaacaggtgctggagaccatctcattcattgcttcaaagcctgatgcgcctactttactttatacgacccatcatgcagaagagattttgcctgtttttcagcacaccttattattaaaagatgggactgtttttgatcaaggagaaacaaaagagatgatgacaagcgatttgctttcttccttctttgaatgtccggtagatgtgatgtggagaaatggccgtcctcacttaagtaaattgtagatgaaagaaactattggtctgtatccctgcttttccatcatacatattatagtagaaaacgaaaggcggggaaggacagatgatcagtatttctgaattccaaatcaaggatgtcgtcgatgtgtcgagcggaaaaaaactaggcaccattggggacattgatattaatgtcacgagcggtaaaatacaagcgatcattatcggcggcacaggtaaaatgatgggatttttcggaaaagaagaggaaatgattgtgccgtggcgaaatatagtaaaaattggcgaagatgtgatacttgtccgattgtcttcttaaaattcgtataactcctcaatgaattattcaatgatccttaaaataagctctccattcttagcaaacaatgtctttttcgggtaaaaagattacgttttcatatcaatttgaaaaaaaacctgtagaaagggcacatttgagtgtaatatttaatgaatcccactaactgtctacgcatgtcttgtggtaaaataggagcgaaataaagagagatgaatgaaaggtgggagggcagctttgacacacaaatatgacccctttcagcagaaatcaccttatgcaatgaccattcatgattggacgaacatgacatgttctggtaaagaggtattggccggatttacgacaaaaaatggcggcttcagcctttctccatatcaatcattgaacactggactccatgtaggagatgatgcttctagtgtccaaatgaatcgtcaagtcatagcagatgctactgctgtgccgctctctgattgggtgtttgcagaccaaacacacgatgaccgcatcaagaaagtcaccaaggagcaaagaggaagaggaagtcttcattatcatgaggcactgcctggaacagacggcttatatacgtctgaaccgaacatgatgctcgctctttgtttcgccgattgtgttccgctttattttctagctccgcaaaatggactcatcggaacagcccatgccggatggaaaggaaccgtcaagcaaattggtgcaaagatggtagatctatgggtcaaccaagaaggtgccaagaccgatcaaatacaagtcgtcattggaccatccattggcagctgctgctacatagtcgatgacgtggtcatggatcaagtgaaacagcttcccttttcaacagaggatgtgtattccgagatttcacaaggacaatataaattagacttaaaaacattaaacaaaaacgtattgcttcatgcagggatgaaagaagaaaacatacatgtcagttcgatgtgcacaagctgcagtgatcagcttttcttctcacaccgccgtgatcaagggaaaacaggacgtatgatgtcttttgtcgggtttaaggaggcataagtgcaattgaatgtacgagagaatctcagacaaataaatgaacaaataaacgaagcatgtaaaagagccggccggaacccagcggatgtatcggtcgtcgctgtcacaaagtatgtctcgattgagcgagcacaagaagccaaggaagcaggaattttgcactttggagaaaatcgtgaccaagggttacttgaaaaacaagcggccataaccgatgaaagcattagctggcacttcatcggcagtttacaaacacgaaaagtaaaatctgtcattcaaacaattgactacttacattcgctcgacaggatgtctcttgcgaatgaaattgaaaaaagagcggatcacacggttcgctgttttgtacaggtaaacacatcgctggaggagtcaaaacacggcttacaaagtgaagacgtgattccatttgtgaagcagctcgctgatttcaaaaagattgaaattgctggactgatgacgatggctccatttacagatgatcacactgtgatacgaaactgctttcaaacattaaaaaatcttcaagaagaagtaaaacatcttaaccaagtaaatgcaccttgtcagcatttatcgatgggcatgtcaaatgattttgaaatcgcaattgaagaaggtgcgacattcgttcggattggctcttcacttgttggaaatgaaacaggaggtgcgtgacatgagcataaaaaataagtttaaaagctttttcactctcgacgatgaagagtatgagtacgaatatattgatgaagaaagagaaccagtccaagaagaaaaaggaacgaaggacaaagcggcatttcaagagcgtccgcagactggaaaacaaaatgtcgtcagcttgcaaagcttgcagaaatcctctaaagtggtgttaagtgagccgcgtgtttatgcagaagcgcaagagattgcagaccatattaaaaacagacgtgcagtcgtcgtgaatttgcagcgcattcagcacgatcaagcaaagcgaatcattgacttcttaagcggaactgtttatgcaatcggtggagacatccagcgcattggctcgaatatattcctctgcacacctgataatgtggatgtatctggcacaatatcagaacttttgacagaggaagaacctcagaggtggtaaatcatagtgattctaaatttcatttttaatattttaggaacggtattaacgatttactcattcgcgattattatttacatctttatgtcatgggtgccatctgcaagagaaacatcgattgggcgttttctgacaaatatttgcgaaccgtatttagaaccatttcgtaaaattattccgccaattggcatgattgacatctcgccaattgtggcattgcttgtgattcgttttgcatcatcatatggactaactggtctttacaatatgattgtacgcttcatgtagacaggctgccgggcttggcgctgccaggctcttttacataagaggggaacaaaatgagcgatatttatcaacattttagaaaagacgaacagccatttgtcgaccaagtgttaggctggaaaaaaatcacactcgaccagtatcgaatgaaattaacagactttcttgatccgcgtgagcagtttattaccgagtccgtcatccagcatgctgatgagcttgggatcatgttttttggcgggtatgaaggagcggagcgcaaaagagctctcatttatcctgaatatttagaaccggctactcaggatgttgagctgtcttattttcaggtgaactatgcgaaaaagtttatttcgttagaacacccgaagcttctcggttcactgattgggacaggcttgaagcgtcaaaaattcggagatctgttattttcagaggaagatgtgcagtttatttgtacaagtgatgtcgccgattttgtgcgggcgcagctgacacatgtcggcagagcctccgtttcattagaggaaatcacgcaggcagatttaaagccggttatgagcaagacagacatcaaagaagataccatttcttcactgcggcttgatgcggtatgtgctgcaatcagccgtcagtctcggcaaaaggcacagcttttggtcaaaaatgggcttgtcaaagttaattggaaagtcactgaggacccttcctttacaatcggcgaaggcgatcagctctctgtacggggatttggccgatttagcttgaaaacgattgatgggaagaccaaaaaagataaattcaaagtaacatttgagcttctgacataacgaacttgaatctggaggtggcgaggttgccattaacacctaatgatattcataataaaacgttcacaaaaagctttcgcggctatgacgaagatgaagtaaacgagtttttaagccaagtacgtaaagattacgaaatcgtgcttcgcaaaaagaacgaacttgaagaaaaagtaaacgaacttgacgaaagacttggtcattttgcgacaattgaagagacattaaacaaatcaatacttgtggcgcaggaagcagcagaagacgtcaaacgtcattctgataaagaagcgaaattgattattcgtgaagcagagaaaaatgcagatcgtattatcaacgaagcgctatcaaaatcaagaaagattgcgatggaaatcgaagagctgaagaaacagtcgaaggtctttagaactcgtttccaaatgctcatcgaagctcagcttgatcttctaaaaaatgacgattgggatcatttactggaatatgaagttgacgctgtctttgacgaaaaagaataagcgcgtcatcttgacatgacgtgcacatgttgcatataataccatcataaattaacaagagataaacgtttgaaagggacactcgcagttgtcatatgcgtaataaagcgaatcagggatggtggaagcctgacattacgagacgctgcaatgagatcacccctttagttccttttctgaaatgaatgagtaagaaaaggcgtctgatcacgttacgattttagagtggataagcggctgtttcatagcgctgtctaaaagggtggtaccgcgagacaagccttctcgtcccttatgggatgagagggctttttttattgttttttaatcagaatttgcatatggaggaatgggtatgaactacaaagacaccttattaatgccgaaaacagaattcccaatgagagggaacttgccgaacaaagagcctgaaatccaagaggagtgggcagaaaaagacatctatcaaatggttttagagcggacaaaaggacgcccgacctttattttgcatgatggacctccatatgcgaatggtgacattcatatggggcacgcactcaataaaatcctaaaagattttattgtccgttttaaatcaatgaatgggttccacgcaccgtacgtaccgggctgggatacacacggcttgccaattgaaacagcactcactaaaaataaaaaagtcaaacgtaaagaaatgtcgacagctgaattccgtaaattatgtgaagagtatgcttggaagcaaatcgagggtcagcgcaatcaatttaagcgattaggcgtaagagcagactgggacaatccatatgtcacgttaaagcctgagtacgaagcgcagcaaattcttgtctttggagaaatggcgaagagaggctatatttacaaagggctaaagcctgttaactggtctccttcaagtgagtcagcacttgctgaagcggaaattgaatataaagacaaacgttcaccatccatttacgtttcatttaaagtgaaagatggcaaaggcgtacttgaaaacggcgaacaattcatcatctggacaacaaccccttggacacttcctgcaaaccttgggatttgtgttcatccaaacctagagtacagcgttcttcaagtgggtgctgagcgatatgttgtcgcatctgagttagttgaacaagtggcaaaaacacttggctttgaagagtatgaagtcgtgaaaacattaaaaggaaaagaattagataccatcgttgcagagcatccgatctatggtagagactctcttgtgatgcttggcgaccacgtgacaacggatgcaggaacaggctgtgttcatacagcaccaggtcacggggaagatgactttattgtcagtatgaaatacggtcttgatgtgctatgtccagtagacgaaaaaggtgtgatgacagaagaagcgcctggttttgaaggattattctacgaggatgccaataaagcgatcacagaacagcttgaagcaaaaggcgcactgaaaaagctcgactttatcacgcactcttacccgcatgactggagaacgaaaaaaccaaccatttatcgtgcgacagctcagtggtttgcatcgattaaagacttcagagaagcgctattagacaatattaaagaaacgaaatgggttccagcatggggcgaaacacgcctattcaacatggtgcgagacagaggcgactggtgcatttcaagacagcgtgtatggggcgttccaattccggtcttttatgcggaaaatggcgagccgatcatcacagatgaaacgattcagcatgtctctcaattatttagagaacatggctctaatatttggtttgaaaaagaagcgaaagaattattgccagaaggctttacacatccaggaagcccgaacggtgaattcacaaaagagcaggacatcatggatgtatggtttgattcaggttcttctcaccaggccgttttagaagaaagagatgaccttgtccgtccggcagacctctaccttgaaggctctgaccaatatcgcggctggtttaactcttccttatcaacagcagttgctgttactggaaaagcaccgtataaaggtgttctaagccacggctttacgcttgataaagaaggacgcaagatgagtaaatcattaggcaatacgattgacccaacaaaggtagcgaagcagcttggggcggagattcttagactttgggtatcttctgtcaactatcaagccgatcacccagtgtctgatgatatcttgaaacaagtagcagaggtctatcgtaaaatccgtaacacgttccgattcctgcatggaaacctatttgactttaacccagcagtcaatgcggtgccggtagaagagcttcgcgaagtggatcaatatatcttgatcaaattaaacaaattgattgataaagtgaaaaaggcctatgatgattacgaatttgcggtcgtatatcatgcgattcacaatttctgtacgattgagctaagctctttctatctcgattttgcaaaggatgtcgtgtacattgagcatgcagatcatccagaccgccgcagcatgcaaacggtcttctacgaaacattaatggcattagtgaagctgactgcaccaattcttccgcatacagcagatgaattatggagccacttaagctttgttgaagagccaagtgttcagttaacagatatgccagaaggtgtgactgttcctcaagcggaagcgacagaagtgaagtttgaccgctttatggaagtgcgtgacgatgtgctaaaagcgctcgaaattgcgcgtaatgagaaagtcatcggacgttcacttgaagcaaatgtgactctttatgcgacagaagaagtgaaaaatcttcttgcatccattaaagaagatgtgaagcagctctttatcatctctgaattaacggtagaagatgagcaaaatgctgacgcatcagcacctggatacacatcaggacggattctggttcaaaaagcagaaggagaactgtgcgaacgttcccgcattatttcaaaagatgttggtgcaaatccgaaatacccaacattgtcactgaaaaatgctgaaatcgtggaaaaatattaccagaattaacagtgtgatatgaccaactagcgccccgccatatgcggggcgttttcttttttgcgaaaatgacagcgtttagaacgaaaggaaaaatcttatggctttaaagtgagcagccggggcaacaatatgattatcacgacagggcaggagttgaaatagcgacatgaatggcgatctagagacgatttacacggaactccttcaaatgaaagaagagctgcaatctaaactgtttgaatacgcatcatttcgttcacccgctgagcatgtcaaaatgaacgaggtccaaacgaccacgcttctttatcacatcaaagaagagctgcaagatgtgtctcttgctattgcaaaaattgagcagggaacctatggtatatgtgaggcgacaggtgaggtcattccgcttgaacaaatgagtattcttcctaccgcccgcacggctgacgactttctatatcataagcaatacgagaaaaaagccttcactccttatcctcacgaatcagatgattctcattttgaagccttccacgtgtagggaggtttttgtctgtcaactaaagtttctttactccttcctgttttcttgataaaatgcttaaagatcaaagtatgaagatggaggaacgtgtgtgttctattacataatcgcattcgtgatgatttgtttagatcaattaacaaaatggctcattgtcaaaaatatgatgctcggagattcttatccagtgattgatggcttcttttatatcacgtctcaccgaaattcaggagccgcatggggaattctccaaggacaaatgtggtttttctatgtgatcacactcgttgttattgcgggaattgtttattatttgcaaaagcatgggcaaaaggacaagctgcttggagtagcgctggccttaatgcttggcggagcgattggaaactttatcgaccgcgttttccgtcaggaagtggtagattttgctcatttcgtctttgggaattatcactacccaatttttaatattgcagattcttctctatgtgtaggggttattctgctcttcattcaaatgcttttagatggaaagaaaacgaaggagtcaactacatgaatcaagtaaatattgccgtttcagaagatcaaacgagtgaacggcttgataaatttctaagcacgacagaaccagaatggtcaagaacccaagtccagcagtgggtaaaggacgggctgatcgaagtaaacgggaaacaagtgaaagccaattacaaagtacaagctggagatgagattaaagtcgagattccagacccagaagtactagatgtagaagcagaaccaatggatcttgatatttattatgaggatgcagatgtgctagtggtgaataaaccacgaggaatggttgttcatccagcgccaggtcacgtctctggaacacttgtaaatggactgatggcacattgcacggacttatcaggcattaatggtgtgatgcgtcctggaattgtccaccgaattgataaagacacgtctggactgttaatggtcgcgaaaaacgatatggcgcatgaatcactcgtcaatcagctcgtggctaagaccgtcacaaggaaatatacggccgttgtccatggcattatccagcatgatacaggcacaattgatgccccaattggcagagacaaaaaagaccgccaaagcatgacggttacaaaagaaagtgcaaaacaagcagtcactcactttgatgtgattgaacgctttcaggacttcacggttgtggagtgccgtcttgaaacaggaagaacacaccaaattcgtgttcatatgaaatatatcggctatccgcttgcaggagatccgaaatatggaccgagaaagacagtcgattttaatggacagctgcttcatgcaggtgttctaggatttgatcatcctagaacaggagaatatatcgagttcacagcaccgattcctgctgatatgcaagcttttatcgattcattaagaaataacgattgacaggcagttctttttttgaaataataaacgaagaaatgaagattctttaaaacagtccagagaggctgagaaggataacggatcaatttgtgcacgtgtatgcacaaatgaacgcccctctctgccctttgcagaaggggctttttatttgtcaaaaagaggtgtaaaagatggaacaaaaagcagtcattcttgatgaacaagcgatcagacgagcgcttacccgaattgcacatgaaatgattgagcgcaataaagggatgaaagatgtcatccttgcggggatcaagactagaggcattcatcttgcaaagcgccttgcagagcgcatcgagcaaattgaaggaaatccagtcacagtgggtgaacttgatattacgctataccgtgatgacctgacaaaaaagacagacaaccaagacccgcttgtaaagggtgcagacatcccagctgacattaatgacaaaacactgatcgtcgttgacgatgtcctgtttacaggcagaaccgtcagagcggccatggatgcccttgtggatgtaggaagaccatcttccattcagcttgctgttctcgtcgaccggggacaccgggagctgccgattcgagcggattatatcgggaagaacattccgacatcaaaagcagagaccgtcatggttcagctgaatgaagtagatcaaaacgaccttgtcgctatatatgaaaaataacctttttaaatgcattccagagagtttgcaaagagggcaataacagagacaccgagcacacggcttaagtgacgtgtacggtttttctaggcctctttgcgcatactcgcaaagaggcttttttaatgaaaaaggacacatctaggaggaaaatcatgagtcagcaaaaagccaatttaggcattcgagatatcccaaaaccgttcacatggctgtcacttagccttcagcatttgtttgccatgtttggtgcgaccattcttgtaccaaaaatcattgatatgagtccggccgtcgcgctcatttcaagtggtgttggaaccattgtttacttaatcattacaagaggacaaattccggcatatcttggatcgtcctttgcctttatcgcccccatactgaatgtcaaagcaacaggcggccctggagccgcaatggttggtgccttcatggcgggtgtcgcttatgcactcattgcactatttattaaatggctcggcacaggctggctgatgaaacttctgccgccggtcgtcgtagggccagtcattatggtcatcggactcggactcgctggaacagctgtcaacatggcgatgtatgttgatccgaatgcaaccgagcttgtttacagccttaagcacctaatggttgccggcttcacactggctgtcacgattatcagcatgatcttcctaagaggattcctaagcttgatcccagtattaatcggaattattagcggctatctctttgctttaacacaaggcattgtgaacttccagccggtcattgacgcgaaatggtttgctgtaccagacttcgtcgtaccatttgttgactacacacctgctgtgactttaagcattctcacagtgatggtgccggttgcctttgtgacaatgtctgagcacatcggccatcaagtggtgttaagtaaagttgtagggcaagattttattaaaaaacctggtcttcaccgctccattttaggagacagtgcagcgacgatcttcgcttcactcattggcggaccgccaacaacaacgtatggagagaacatcggggtccttgccatcacaagagtgttcagtatcttcgtcatcggcggagcagcagtctttgcgatctgcttcggctttgtcggaaaaatttcagcattaatcagtacagtgccgtccgcggtcatgggaggcgtttcgttcctgctctttgggatcattgcctcaagcggtctgagaatcctgattgatcataaagtgaattttgaagaaaagcgtaatctcattatcgcatcagtcatcttagtcattggaattggcggggcattcattgaggtgaaacaaatcaacctcacactatctggaatggcacttgctgccatcacgggtgtcctgttaaacctgatcctgccgcagcaaaaagcggaggatgacgagtcaaatgaatcgaatacagaaaaccttttaaaagaagtccagtgaggctgacaagggttctaaaatgagcagaatgcacgaaagtgccgctgcttcttttggagaaccctaagctgccgaggcttagggtttttttgaacctgaaagtgatgaaaaactagagggggaagaaaaaatgaatgatctatcgacaatgagcagcttgtctaaagaagagattttacagctgattgaagaagcagcggctctcaaaaaggggaagcaagaacttggcttagcgggagaatttgtagcaaacctcttctttgaaccaagcacaagaacacgatttagcttcgaagttgccgaaaagaaactggggatgaatgtactgagcttagatgcagcaagcacctccgttcaaaagggcgaaacactttacgatacggtaaaaacgctcgaatccatcggcgtgaaagcatgtgtgatcagagacagcaccgatgaatattacaatgagctgatcgggaaggttgggattcccatcatcaatgctggagatggctgcgggcagcatccgacccaatcactgcttgacctaatgaccatctatgaagagtttgacggctttgagggcttaacgatttcgattcatggagacatcaaacacagcagggtggcaaggtcgaatgctgaggttctttcaaggctgggagcaacagtccttttttcagggcctgcttccttccaagatgagcaaaaccctcacggaacgtatgtccaagtagatgaagccattagacaatctgatgtggtgatgctgctcagaattcagcatgaacgacatgctgaaaaaatgggcagcgaagattacttatcgacttatggattaacagtaaacagggcaaacaacatgaaagaacgagccattataatgcatccagcaccagtgaacagaggtgttgaaatagatgattcattagtagagtcaaagcagtcaaggatttttaagcaaatggaaaatggagtctatatccgaatggccgtattaaaaagagcttttcaaaatagcagactacatcaaaaagggagagattctgtctatgtcgtatctcattaaaaacggttttatcttaacaagcacaggcgaaaaagtgcagcaggatattagggtagaaggagaagtgattcaagcgattggtcacttagaaagagaagacggagaagaggtcattgatgctaaagggctatttgtttcaccaggcttgattgatctgcatgtacatttaagagagccaggcggagagaaaaaggaaacgattgaaacaggctctaaagcagccgcaagaggcggatatacgacgattgcagctatgccgaatacacgcccagttccagatacaaaagagcaaatggaatggctcatggatcgaatcgaagagacctcttctgtcagagtactgccatacgcctccattacaactagacagattggggaagaaatgacggactttgcagcactaaaagaagcaggcgccttcgcttttacagatgacggagtcggcatccaaacagcaggcatgatgtacgaagccatgaaaaaggcagcaagtcttgatcaagcgattgtggcacactgtgaagataactcgctcatttacggaggatgcgttcatgaaggagaattttcaaaagcaaatgaattaaacggtataccgtccatttgtgaatcggtgcatattgcaagagatgttcttttagcagaagcagcgaactgccattatcatgtatgtcatatcagtacgaaagaatctgtgcgagtcgttcgcgatgcaaaaaaagcaggcatccgtgtgacagctgaggtgtcaccgcatcacctgctgttatgtgatgcggacatccctggtcttgatacaaactataaaatgaacccgccgctcagaggaaaagaggatcgcgaggcactgatcgagggacttttagatggaacgattgatttcatcgcaacagaccatgcgccgcatactgaagaagaaaagaacgaaacgatgcagcgtgcaccttttggaattgtcgggcttgaaacagcgttcccgcttctgtatacacgatttgtcaaaacaggcgaatggacattaaaagaactcgttgattatatgacaatcaagccagcagaagccttctctcttccatatggaaagctggaagaaggacaaacagctgatatcacactcattgatttaaacaaagaaatggcaatcgataaaaaaagcttcttatcaaaagggcaaaatacaccgtttgacaaattgactgtatcaggatggccggtcatgacacttgcatctgggaaagtcgtgtatgaagaggggagactagtaaaatgaagagacgcttagtgctagaaaacggaacagtattcgaaggaacaggctttggcagcttagaatcgtcagtcggagaagtcgtctttaatacagggatgacgggctatcaagaaattttgtctgatccatcatactgcggacaaattgtcacactcacttatccgctcatcggcaactatggcattaaccgtgatgattttgaatcgatcacaccgtttgtaaaagggctgattgtgaaggagctttgtgaaaagccctcaaactggcgctcttcatactcactagatgaatacttaaaaatgaaaaacattccaggtcttagcggaatcgatacacggaagctgacgagaatgattcgaagtgcagggactttaagaggggcgtttgcaggaccggaagaacaagtggaagacgtagtccgccgccttcaaacaatgcagctgccgactgatcaagtgagtcaagtatctgtgaaaaatgcgtatccaagcccgggaagaggaaaaagaattgtccttgtcgatttcggcatgaagcatggaattttgcgcgagctcaataaacgtgactgtgatgtcatcgtggtgccgtacaatatcacggcagatgaagtgctgcagttaaagcctgatgggatcatgctttcaaacggccctggagaccctgttgatgtaccagaagcagtcgagatgattcagcaattgattggaaaggttccgctctttggcatttgccttggacatcaattattcgctcttgcgtgcggcgcaagtactgaaaaaatgaaattcggacacagaggctcgaatcacccagtcaaagaactagccaccggcaaggtgacactgacatctcaaaaccacggctacacagtcagtgcgattaacgaggacgtgctcgaagtcacacatatcgccctaaacgacaatacgattgaagggttaaaacataaagaagcaccagcattcactgttcagtaccacccagaagcgtcaccaggtccagaagatgcgaactacttattcgaccagttcatggacatgattcatacaactgagaaagaaggggaagaagtatgccaaaacgcgtagacatcaaaaagattttagtcatcggttcaggtccaatcatcatcggacaggcagcggagtttgactatgcaggcacacaggcttgcttagcactgaaagaagagggctatgaagtcgttcttgtgaattccaatccagcgaccatcatgacagatacagaaatggccgataaggtatacatcgaaccactgacaccagaattcttaacacgaatcattcgaaaagaacgtcctgatgcgatcttgccaacacttggcggacaaactggacttaaccttgctgttgaactatcagaccttggcgtattagctgaatgcggtgttgaagtattaggaacaaagctgtcagctattcaaaaagcagaggacagagatttattccgtaatctgatgaatgaactaaatgagcctgtaccagaaagtgaaatcatccataaccttgaagaagcgatagcgtttacgaatcaaatcggtttccctgtcattgtgagaccagcttatacattaggcggaacaggcggcggaatttgtacaaacgagcaagagctgaaggaaatcgtcgaaaacggcctgaagttaagcccagtcacacaatgcttacttgaaaaaagcattgcaggttttaaagaaattgaatatgaagtcatgcgtgatagcggtgatcatgcgatcgttgtttgtaacatggaaaactttgatcctgtcggtatccacacaggtgacagtatcgttgtggcgccaagccaaacattaagtgaccgtgaatatcagctgcttcgcaatgtgtcgctcaagctgatccgggcacttggcattgaaggcggctgtaacgtacagctggcgattgacccagacagctttcaatactatatcatcgaagtaaacccgcgcgtcagtcgttcttctgcacttgcgtcgaaagcaactggttatccaattgccaaacttgcagcgaaaattgctgtcggcttaacgcttgatgaaatgatgaatccagtcacagggaaaacctatgctgccttcgaaccggcacttgactatattgtgtctaaaatcccgcgctggccgtttgataaattcgaatctgctaacagacgtcttgggacgcaaatgaaagcaactggtgaagtgatggcgatcggacgtacattagaagagtcccttctaaaggctgtccgttcacttgaagctgatgtgcatcacattgaattaaaagatgaagcagatatcacaaacgaagtgcttgaaaagcggattatcaaggcgggagacgaaagattattctatatcgccgaggcgcttagaagaggctatacggttgaacaaatacatgaattctcaaaaattgattacttcttccttcataagctggaaggcatcatcgcatttgaaaagacattaaaagaaaacaaaggcaatacagacgtattaaaagatgcgaaagataaaggtttctcagacatctatattagccgcgagtggaatatgaatgaagcggatgtctacaagctaagacaagaagcaggaatcgtacctgtctacaaaatggtagatacttgtgcggctgaatttgaatccgagacgccatatttctatagcacgtatgaagatgaaaatgaatcagaacgcacagacaagaaaagcgtcatcgtattaggctcaggtcctatcagaatcggtcaaggagttgaatttgattatgcgacggttcattctgtgtgggcaattaaacaagcaggctatgaagcaatcattattaacaacaaccctgaaacggtctcaacagactttagtatttcagataagctctactttgaaccactcactgtagaagatgtgatgcacatcattgatcttgagcagcctgaaggagtcgtcgtccagttcggcggacaaacggcgatcaacctagcagatgaattatcaaatagaggggtgaagattctcggcacttctcttgaagacctagaccgcgccgaaaaccgagacaagtttgaacaaacattagaagcactcggcgtgccgcagcctaaagggaaaacagctacgtctgtgcctgaagctgtagcgattgccaatcagatcggctacccagtccttgtccgtccttcctatgtattaggcggtcgtgcgatggaaatcgtttatcaagaagaagagcttcttcactacatggagaatgcggtgagagtcaatccgcagcacccagtgttaattgacaaatatttgacgggaaaagaaattgaagtagatgccgtatctgatggggaaactgtcgtgatcccaggcattatggaacatattgaaagagccggggtccactccggtgactcgattgcggtttacccgccgcaaacattgtctgatgagatcaaagcgaagatcgcagaatacacgatcaagcttgcaaaaggcctcaatattattgggctgctaaacattcaatttgttctctcgaaaggtgaagtgtacgtacttgaagtgaatcctcgttcaagccggacagttcctttcttaagtaaaattacaggcatcccgatggcaaatctagcgacaaaagtcattttaggtgacaagcttaaaaactatggctacgaagaaggacttcacacagagcaagaaggggtgtacgtcaaagttccagtcttctcttttgcaaaactaagaagagtggatattacactcgggcctgaaatgaaatctacaggtgaggtcatggggaaagatgtcacaattgaaaaagccctctacaaaggattaattgcatcaggcattcaaattcctaaagacggaacagttcttctaacagttgctgataaggataaagaagaaggacttgagattgcaagaagattccattcgatcggctatcatattttagcgacagaaggcacagcgaattacttaaaacaagcctccatcccatcaagtgttgtcggcaaaataggagaagaaggcaaaaaccttctcgatgtcattcgaaacggggaagcccaatttgtcatcaacactctgacaaaaggaaaacaaccggcaagagacggctttagaatcagacgtgaagctgttgaaaatggcgtagcttgcttaacatctctagatacagcagaagccattttaagagtgctggaaagcatgacatttagagcggacgaaatgccagtagtgaaaacgaatgctgaggtgacagtaacgatatgaaaaaagcatacttgacggtcgtctcaaaccgagagatcgctgatcatatttacgaaatgacattaaaaggtgaccttgtggactcctttcaaacggctggacaatttcttcatatcaaggtcagcgagtccatgacaccgctgctgagaagaccgatcagtattgccaatattcatgccgagaaacaagaagcaaccatcatctaccgcgcagagggagagggcacaaagctcctttcccaaaagcgggatggggaatccatcgatgtattaggaccgcttggcaacgggtacgatccttcagttgttcagccaggtcagacagccttactagtcggcggtggaattggtgtaccgcctttatatgaactgtccaagcgtttaacgaaaaaaggtgtcatcgtcaagcatgtccttggctttcaatcgaaaaaggatgtattttacgaggagaaattccaagcactcggagatacgtttatcgcgacagttgatgggacatatggttcaaagggcttcgtgacaggtgtcattgaagagaatgatttgagctttgatgtcatgctttcctgcggaccgacacctatgttaaaagcactaaaagactcttatcccgataagcctgtctacatttcaatggaagaacgaatgggctgcgggattggtgcttgctttgcatgtgtctgtcataccgaccagcacgaaaaaccttacgtcaaagtctgtctggatggacctgtatttaaagcagaggaggtggcattgtcatgctaaacgttgagttacccggcttatctttaaagaatccgattatccctgcatcaggctgctttggattcggaagggaatttgcttcattatatgacttatcagtgctgggcggtatcatgatcaaggccacaacccttgaaccgagatttggcaatccgacaccaagggtagcggagacaggtgccggtatgctcaatgcaatcggtcttcaaaatccaggcctaaaaggcgtgctggaaaatgaattgccttggcttgagcagtttgatacgccgatcattgcaaacgtcgctggctcacaggtcgatgattatgtcgaagtagccaagcaaatcagccaagcaaaaaatgtccatgcccttgaactgaatatttcatgtccgaatgtcaaaacaggcggaattgcctttggtacagatcctcatatggcagcagcattgacaaaagcggtgaaggacgtttcttccgttcctgtctatgtcaaactgtctcctaacgtagccaatattgtggagattgctcaagcgattgaatctgctggagcggatggactcacgatgattaacacgttaatcggtatgcgtttagatttaaaaacggggaaaccgattcttgccaataaaacaggcggattatcaggacctgctgtcaaacctgtcgctgtgcgcatggtacatgaggtcagtcaagcagtgtctatcccgattatcggaatgggcggggtacaaaatgctgaagacgtacttgaatttttactagcaggtgcaagtgcagtagctgttggcacagccaattttgtaaacccgtttatttgcccagaaatcattgaagaactgccaagagtgttagcagcatatggctattcatctgtagaggaatgtatcggaaggagctggaaacatgaagcacttgcccatcatcgcgcttgattttccggtagcgcaggaagcgctcgcctttttagaaccctttgaagggacgccattatttgtgaaggtcggcatggagctgttttaccaagaaggacctgctatccttgacgagctcaaagaaaaaaattgccgcattttcctcgatctcaaattacatgacattccaacaacggtgcaaaaagcaatgaaccggcttgccgcacttggtgttgatttggtcaatgtgcatgctgctggcgggaaacatatgatgcaagctgcgttagaagggcttgaaagcgggacgcctgctggacaaaaacgtccaggcattattgcagtgacacagctgacgagtacgtcagaagacatgatgaggagcgaattactcatagaccgtccgctgcaagagactgtcatccggtacgggcaattggcatatgaaagtggactagacggtgttgtttgctctgttcatgaatccaaagcccttcatgagcacatctcacctgcctttctcactgtcacgccggggattcgcttacaaaatgatcaaaccgatgaccaaaagcgtgtggcgactcctgcctatgcaaaagagcaaggtgtatcacaaattgttgtcggaaggtcattcacaaaagctgaaaaaccattggaagcctatcatcaaattttaaaagagtgggagtgactgccagatgaaaacaaaaatcgctaaacacctattacaaatcaaagcggtctcattaaaaccagacgaaccgtttacatgggcaagcggtatcaaatcaccgatctattgtgacaaccgtcttaccttgtcctacccagaagtaagacacgacattgctgaaggtcttaaagagttgattctcactcattttgaaagagcggaggttgttgctggtactgcaacagcaggcatcccgcatgcggcattagcggcagaccgtctgaacgtgccgatgtgttatgtgagaagtaagccaaaagcacatggaaaagggaatcaaattgaaggagccgtatcaaaaggtcaaaaggtggtcgtcgtagaagacttgatttcaacaggaggcagtgtgcttgaagtggtcgctgctcttcaagaagcgggctgtgacgtactaggcgttgccgcgatcttcacatacggactgccaaaagctgcagcagcttttcaagagaaaaacattccatatgtcaccctaacagactatgacacactgacagacgtggcacttaagctgaaagcgatcgagccttctgctatgaataaactaaaacgctggagacaagatccttcctctgaatcttggatggaagaaaccgtctaaaaagctgtgcgtacccgcacagcttttttatttggttaaaaatagtaaaatagactcaaattcaaataaaaactaatcctatcaataaagtcgggttgacttttgtttgaattgtgttaatatttaagacaaattaaaacacttatccagagaggtggagggactggcccgatgaagcccggcaacctgcgatttgcaaggtgctacttcctgcaaaatgattctattttgaaagataaggaaatgagcttcctcatctttctttcggactgaaaggaagtttttttattttaacggtgaggaggaagacgagatggaagtgaagcgaaatcaggatgaagacttattgaagcatatgcagaaactgattggggatatgaattcggttcagttacgctgattgttcaggacggtcaagtgattcaagtggaagaaaacagaaaaattcggttgacgtagtgcggagagtagtgatactccggaaggggagaaacaatgttaacttatgaaaattggcaagagccgtccattacatttcaagaggatgatttgtataaaggggccttatctgtgctgaaatgggcatacggtcattatggtgatcagctcgtttatgcatgcagctttggtattgaaggcatcgtcctcattgatcttattgcgaaagtaaaaaaggatgcaagaattgtctttttagatacaggtctgcattttaaggaaacgtacgacacaattgatgcggtaaaggaaagatacccaggtttagatattgtgctgaaaacccctgagctgacggttgaggagcaaaacgagcagcatggtgatcagctatggaaaacggaccctcaaagctgctgccatatgcgtaaggtcattcctttgcaagaagcgctatccggctatccggcatggctttctggcttaagaagagagcagtcacccaagcgagcagggacgaactttttaaatcaggatgaaaaattcaaatcagtgaaagtatgtcctcttatccactggacgtggaaggacatatggagatatgcatctagagaggaacttacttataatccgctgcatgatcagggatatccaagtatcggttgtgccccgtgtacacagccggcatttactgccgaggatcttcgttctggcagatggtcaggcacagctaagactgagtgcggattacatgagtaagggagcataatgtatggaaatcgccgcaattttatttagtttatttttcgctctaaacattggcgcgagtggtgcagctgcttcgatgggcatcgcgtacgggtcaggtgctattcaaaagcctatctatgcacttagcgtatgtgcagttgggattttagcaggttcagtcattggcggcggtgaggtcgtcaaaacgattagctctggaattatgcctgaatctgtcattacacttgaaattgtttgtattattattggttctgctgcattatcactctttatagcgaatctgatggccatccctttatcaacaagtgaggtcacagtaggtgctgtcgttggagttgcagtagcgtataaagtattgtatgtgaaatccattttagtcattgtgtcattttgggtcatcattcctattgttgcttttctttttacattcgttgtagtcaaaatcatcagaatgttcccgaaacgaactttgtcaaaaaaaggcaccatgattttatcgatcgttttgatcatcagtggatttctagaagcgttttctgctgggatgaacaatgtcgcaaatgctgtaggcccccttgttgcttcaggcattttatccgttgggcaaggaacgctttacggcggacttttcgttgcactgggtgcccttttattaggaagaagagtgcttgaaacaaacggaaagaaaatcacccgctatcaaacaggtgaagggattttgctttcgagtaccggtgctggacttgtcatcgtcagctctatttttgggctgccagttccacttacccaaatcacctcctcgtctatcattgggcttggaatggcaaaaggcggaccaaatatttttcataaacatgtggtgaaaaaaatgctgaaagtgtgggtagtgtcaccctttttatcacttagcctatcgtatttgctggtgagccttttcttaaaaggagactattattctatctttatcatgatgagtgtactgcttgcctcacttggtgcgctgagtctgatgaaggcagtcaaaaatgaaagcagctcgattcatgaacagggcggcgggatttaacggcaaatccgactatttacatctaataaatatgaacattgagaggaagatgaacaaatgagtttaacaccacatggtggcgtattaattaatcgagtaaatgaagagtatgatctcagcacggctgcaaaggaaattgaactagatgctatctcctttgcagaccttgaactcatagcaattggcgggtatagtccaattgaagggtttttaacaaaagctgattatgaagccgttgtgagcagtatgcggttagcaagtggtgttgtttggtctcttcctattacactgccagtgacaaaggaaaaggcagcggagatccatcaaggtgatattgtgcgtctatcgtataatggaactgtatatggggtgattgaagtagaggatcaatacacaccagataaggaaaaagaagcggtgaatgtatataaaactgatgaccgcaatcatccaggcgtgaaaaaattatttgaacgcggtgacacttacattggtggtaaaattacactgacgaaacgcagtgaaaaaccattccctcaatttacgtatgagccagaagaaacaagacggcatttcaaagaaaacggctggaaaaccattgttggtttccaaacgagaaaccctgttcaccgtgcccatgaatatattcaaaagacagcacttgaaacagtcgatggtttgtttttaaatccacttgtcggtgaaacaaaatcagacgatattccggcagacgtgagaatgaaaagctatcaagtgttattgaacggttattatccaaaggatcgcgtctttttaggtgtttttcctgcggcaatgcgttatgctggaccaaaggaagcaatctttcacgcgcttgttcgaaaaaattacggctgcactcattttattgtgggaagagatcatgcgggtgttggtgattattatggcacatacgaggcgcaggagttatttgaacaatttacaagtgaagaaattggcattaccccgttaaaatttgaacatagcttctactgtaatacatgtgaagcaatggcaacaccaaaaacatgtcctcacgataaaagcgagcatgtcattctttcaggtacaaaggttcgaacgatgctgagaaacggtgaattaccgccaagcacgttcagccgaaaagaagttattgaaacattaatcgaaggattaaaaacgacggtatcttaatgggagggtatgacatgagcaatgaacatatcgtgtggcatgattcatctattacaaaaaaagaatatcaacagaaaaacaatcatacgagcggcattatttggctcacgggtctaagtgggtcaggtaaatcaacgatcgcaaatgcagcggccagagagctgtttgaacaaggctatcaagtcaccgttcttgatggcgataatgtaaggcatggactgaataaagatttagggttttcagatgatgacagaaaagagaacattcgccgcatcggagaagtggcaaagttatttgttgaacaaggaacgattgtcatcacggcttttatttctccatttcaagaagaccgccgcattgtcagacagttagttgaagcgggagaatttcacgaagtgtttgtgaaatgtgatctgaacgtatgcgaagagcgtgatccaaaggggttatataaaaaagccagaaatggcgaaattccattctttaccggaattgattcaccgtatgaagaaccagctgcgcctgagctcgtactagatacaggtgaattatctcgtgaagagtccaaacagcgtcttgttgattatgtaaagggaagagcgaaataatcgcctgatggcagggggagaaaagcacgatggggaaagtatacattgtgggggctggacctggggatccagacttaattacattaaaagcccataaggcaatacagcaggcagatgtcattttatatgatcgccttgtcaatcaagaaatactcgcccacgccaaacccgaggcggaattaatctattgcggcaagctgccaaatcatcatacgatgagacaggaagccatcaatgaagcccttgtggcccatgcaaaggaagggaacgttgtcgttcggctgaaaggcggcgacccctttgtattcggccgaggcggtgaagaaatcgaatgcttagctgagcacggaattccgtatgaagtcgtccctggaattacctctggtattgcagcggccgcttatgcaggcattcccgtgacgcatcgtgaattcagctcaaatgtcgcttttgtcacgggtcactatcaaaaggatgagcattttgaagaaaagtgggaagcgctggctacggggattgatacccttgtgatttacatgggcgtcaaaaacgtgaaaagagtgcagcagcttcttttaaaaaatggacgcgatcctgaaacgccagcagcgtttatacactggggaactacgacgaggcaaaagacgacttgctgcactgtggcgacactgtctgaaacagttgaaaaagaaggcatcgagcatccaagtttaattgtagttggagatgtcgttcattttcaccaaaaactgagctggtttgaacccgccttaatcgagaaatgagaatgataaagaaaagacacgtacatcgatcgtgtcttttcgtctgatcaaaacaagtagagggaggagccacatgaaacaagctgtactttatgttgggcatggaagcagagtaaaagaagcacaagataaagccatttcttttatgaaaagctgtatgccgttagtagaagcagatatacaagaaatttgttttttagaactgacagccccttctatagaagaaggatttgaagcctgtgtgaaaaaaggagctacacacattgcgatcgtcccgctcctccttttaactgccatgcatgccaaatcagatattccagtcgagattgagaaagtacaaaagcgatatccgcaagtgaaggtcacatacggaaaaccaatcggggtcaatcaagaagtgacaaaagcggttgctgcaagaattgaagaggcaggatatcaaggcgggaaagcacggattcttttaattggccgcggaagctctgaccccgatgtgaagcgggatgtgtttggcattgcggacgatgtccggcgcctgctccctctcgcagaggtcttgccatgttttattacggcatgtgagccaaattaccgagatgttcttgcgcaattaacagcagatgatgatgcgcctgtttatctcgttccttacttgttgtttacgggtattttaatgaaagagattgaaaatgaagcggctcaggcgagaaagaggctgaaagatgtccgggtatgccggtatattggctttcatccgcatgtaaaagcggcttatattgaacgcgtgcaagaaaccattttaaacaaagacgatgcgtttcatttccaaggagaaagccatgcttccagtccatcttgatttaaccgatcaacaagtgctcatcgccggcggtggacgaatagccgcaagaagggcagaggcgctatgcatggagccttgccatataatcgtcgtgagtcctgacatttctaaagagatggcacgtctcattgatacatacaacctgaattggaaggaaaagaaagtggacgtggaagatttagagggtgcatttttcattgtagctgctacaaacgatccagcggtaaatgaatggattgcacaaacagcccggcctcaccagctagtgaactgtgtgagccaatcagagcttggcaatgtgatcgtgccaaaggtggtcaaagcagggaaagtgacgatttcagtctctacaagcggtgcgagcccagcccggacaaaacaactggctgcggaaattgaggcgttgctagaacaagaggatgtagatgcacttgacgctctttatatcgaaagaaaaaaacaacaaagaaaaagccgataaaatctctttaagggattttatcggcttttattattttcgcagctttaggaccacatcttcgtcaggcgtgacaaataatgtttgctgctgatcatacgtcacaaatcccggctttgctccatttggttttttcacatgccggattttcgtataatcgacaggaacggagctcgactcctttgctttcgagaagtaggcagcgatttgagccgcttcacgcagcgtctcttcatcaggtgcttgatgacggatgacgacatgtgatccaggaatatccttcgtgtgcagccaaatgtcgtcacgggcagcagcctttgtggttaaatactcgttttgtttgttgttttttccgactaaaatcggaataccttgagacgattcatacgtttcaagctgaatggccgcctgttttttctttttggcgttgcgcttttgtttggcgcgtaaatattttccttcaacaagttcttctctcatttcctctaaatccttcggtgaggcagaggatagctgctgaatcaactcttcaaaataagcaatctcttcatgcgtccgctcaatttgttcattgaccgcttctactgcattttttgccttttgatattttgtgaaatacccttgcgcattttcagaaggggttttgtttgttttgagcgggatcgtgatctctccgccatcttcatcgtaataattgatgacagtcgcttctttatccccttttttgatggcatataaattggctgttaacaattcgccatagagctgatatttatgtgcatgttgagattcttcaagagttcttttcagttttttgagcttgttttcatttttctttttttcatttacgacaaaccgttcaaggtcagacgcctgctgtttaactctgtctctctcagcttttccgaaataaaagcggtcaagcagctggctgagagagtcgaatgtcttcatctcgccatggacatgctgaagttctaataaatagaaatattctttcccgtcttttcttgtgagctgcggggtaaaggagtgcatgcgaataagctggaacatgtcgagcagtgtatttggaatcgtttcctgattgacaagaccggccctgtgtacagcttcctttgcaaacagcggagaaaccccagagaatgtatcgacaatttgatttgcgatctttccttcttgaaagcgtaaatgctttaaaatatcattcttcgtcacttcaaacggattcaatttttgctgtgcaggcggcagaaggtattcgtgaccaggaagtaccgttcgatagctgttcacagatggagaaagatgctttaggccatcgatgatctgctgcgtgtcatcttctacaagaatcaaattactatgccttcccatgatttcaatgtagagctttcgagtctgttcgtcgccaatttcattgcggcttcgtacatgaagtacaatcacccggtcaaatccaatctgttcaaaacgttcaatgaatccgccctcaagatgctttctgaggagcatacaaaacattggaggttcgcttggattgtcatattgatgctctgtgagctgaattctagcgtagctcggatgagcggataaaaggagcttatgattttttccgtttgcccggatatgaaaaatcagctcgtgcttatatggctgatgaatttttgaaattcttccgccagttaatgtctcttgcaattcatttgtcataccatatgtaaaaatgccgtcaaatgacatgttggatacaccctcttctttcacacaaatctactgaaagaaccttccgtttctcgttctttaggcagtcttattattatagcatgatttaggacgagtctgaataaactggcttatagaacactgcatatgagagagaacaaaagaggagtggacgaggtcaaatgaattggcatgaactgaaccaaaccgatttattaaaaacaatgaatacatcgataggtgacggactgtcagaaaaagatgtacaaaaacggcttgaaaaacacgggccaaatgaattgcaggaagggaaaaaggcgtcggctctgatcatttttttagcgcaatttaaagattttatggtgttaattttgcttgcggcaacgatcatttctgcttttttaggcgaatacattgatgctgtagcaattgtagcgattgttctgattaatggagtgctcggcttttatcaagaacgccgcgcggaaaaatctcttcaagcgctaaaggaattatcaaccccgcatgtgtatgctaggagaaataatgaatgggtcaagatcccgtctaaacatctcgtgccaggggatattgtgaaattttcgagtggagaccggattggggcagacattagattactagaaaccaaaagtttagaaattgaagagtccgctctcactggcgagtccatccctgcggtcaaacacgcaagtccgctttcacgagaccatgtctcgcttggagatttgacgaacatggcctttatggggacgcttgtcactagaggaagcggcgtgggcgttgtcattggtacagggatgaatacagcgatgggacaaattgccggcatgctggatgcagcagggaatatggaaacaccgctgcaaagacgtctcgaacagctggggaaaatcctgattgttgctgctttatttttaacggttctcgttgttgttcttggcgttgtgcaaggacatgatttgtatcatatgttcctggcgggagtatctcttgcggttgctgccattcctgaaggactgccggcgattgttaccgtcgcactttccttaggagtgcagcggatgatcaaacaaaaatcgattgtcagaaagcttccggcggtggaaacacttggctgcgcgtcgatcatttgctcagataaaacaggaacaatgacgcaaaataaaatgactgtgacacatgtatgggcagagggcaaaacgtggaatatttctggtacgggctatgagccatctggtgatttcaccttaaacggagaacttgtccatgtagacaaacatccaagtctgcaaaaggtgttattatacggggcgctttgtaatacatcgaccatcattgaaaaagatggcgaaatgaggcttgatggagatccgacagagggggcgcttctcaccgcagcacgtaaagcagggtttactgagcaattcatcgaagccggatttcacgttgtagaggagtttccttttgattcagaaagaaagatgatgtcagtcgtcgtcgaaacgaatcaaaaagagcggtatgtcattgcaaaaggtgcgccggatgtcctgatgaaccgttcaagtcatatcatgcacggcggccgcacagcttctttttcaaccactcacaggcaagaaacagaggctgcgattcaaggcttagcaagacaagcgctgagaacgattgccattgcgtataaaaaagtcggtctgacagaaaaaatcaactctgtccagcaggctgaaaccgatttgacatttatcgggttagagggcatgatcgatccacctcgtcctgaagtcagacgagcgattaaagagtgcagggatgctggtataaaaacagtcatgattacaggggatcacgtggaaacagccaaagcgattgccaaagatttgagccttttaccaaagcaaggaaaggtgctcgacggaaaagcgctggatcagatgagtgacaaagagcttgagcaaacggctgaaaatgtatacgtctttgcacgggtatcacctgaacataagctgagaattgtgaaggcctatcaaaaaaatggacatattgtggcgatgacaggtgacggggtcaatgatgcgcctgcgattaagcaagcagatatcggcatctccatgggcatcactggaacagacgtagccaaagaagcatcttctcttattttacttgatgacaactttgcgaccattaaatccgccattaaagaaggccggaatatttatgaaaacattcggaagtttgtccggtatttgctggcatccaatgtgggagaaattttggttatgctgttcgcgatgctcctagcacttccgcttcctctcgttcctattcaaattttatgggtcaaccttgtcacagatggtcttccagcgatggcacttggcatggataagccagaaggcgatgtcatgaagagaaagccgaggaacatgaaagagggcatttttgctagagggctcggctggaaggttgtatctagaggattcctcatcgggcttgcgacccttttagcatttatgtttgtgtatcaccgcgatccaaacaacctgcaatatgcacagactgttgcatttagtacgcttgttttggcgcagctcattcatgtatttgactgccgcagtgaacggtccatctttgaacgcaatccattcgggaatctttacttgatcggtgcggttttgtcatcacttttacttatgtttgtggtcatttattatccgccgcttcagccgattttcaaaacggtggccattgcaccaattgattggctgctgatcatcggtatgtctgcactgccaacttttttactggcaggatcacttttgacaagaaaaaaataattcgttatggtataattttgaggtaatagtgtctgctattacctttttcattttattaatatgaaagaattgggtgttttgacatgatacgcagtatgacgggattcggccaagcgagtaaaacggatggagaactgacagtgtcagttgagctaaaatcggtcaatcaccgttttaaagaggttcatgcccgtttgccgaggccgcttttatatttcgaagacacattaaaaaaaatcattcttcgtcacgtgcagcgcggtagaattgagctgtttgtcacgattgaaggcggtaaactagcaagccggtccttgcagatcgactggccgctgcttgatgaatacatgaaagccgcaaaagacctcgagaagcgctatcacatttcaggcattcagcatgcacatgacttactggggctggagcatgccgttcaagtagaagagtcggccagccgaaatgagcagttagagcaattgctgatggatgcttgtgaaacggctgtcaaggagctttgcttcatgagagagcaggaggggacatcacttcaaaaagactgtgagctgaggctttctgaattagaggcctatacagaagaaatcaaagtctttgcaccagaggttgtgactcagtataaagacaggctcaatcagcgattgcaagaatggatcggagaggcgcttgacgaaagcagattgacaacagaggctgccatctttgctgaccgctgtgacattacagaagagattacgagattgaaaagtcactttcagcaattccggcaaatcttgatacaaggcggtgctgccggcagaaaacttgattttcttgtacaggagctcaaccgtgaagtgaacaccattggctcaaaagcgaaccatcatcatttaacaaagctggtggttgaaatgaaaagtgctattgaaaaaataaaagaacaagtgcaaaatatagaatagtcattgtgtatgctgtttacagtacgtctctttcggcgagactagagacgtttatattacagggggacgttagaagatgaccataaagttgatcaatatcggatttggaaacatcatttcagcgaatcggatgatttcgatcgtcagtccagaatcagcaccgattaaacgaatgatacaagacgcaagagatcgaggcatgctcatagatgctacatacggaagaagaacccgtgctgttgtcattatggacagtgaccatgtcatcttatctgccgttcagcctgagactgtcgcgcaaagactttctgtaaaagaagaaatcatagatgaagggcaggggtaatacgccattatgaaagaaagaggacttttaatcgttctctctggaccttcgggagttggaaaaggaacggtcagacaagccattttctcccaggaagatacgaaatttgaatactctatttctgtgacgacacgtaaaccgcgtgaaggtgaaagaaatggtgtcgattatttctttaaatccagggaagaatttgaacatatgattgaaaacaaaaagctgttagaatgggcagagtatgtcgggaattactacggcacgcctgttgactatgtagaacagacattaagcgaaggaaaagatgttttccttgaaatcgaagtgcaaggtgcacttcaagtaagagaagcattcccagaaggtctttttattttccttgcaccgcctagtctttcggaacttcaaaaccgcatcattacacgtggtacagagtctgaggagctcattcgcaatcgaatggctgctgcaaaagaagagattgaaatgatggatgcttacgactatgtcgtggaaaacgatgatgtcgagcttgcttgtgaaagaatcaaagcgatcgtccttgcagaacacctgcgcagagacagagtcgcaccaagatataaaaaaatgctgggggtagaataaactatgttagatccttcaattgactcattgatgaacaaacttgattcaaaatatacacttgtgacagtgtctgcacgccgtgcacgtgaaatgcagatccaccaagatcagcaaatcgaaaatacaaagtcttacaaattcgtaggcaaagcactggaagaaatcgatgccggtcttttgacatttgaaaaagaggatcaagaataacacatcgcttctgctatgcagatacgatacgttcaaaaaagtcaaaactatgattggttttgacttttttgaattgtagacgaatttgtgaaaaaggccgttaagggggacaaacaaatgttacagtcaaaaaatattttgctcggcgtcagcggaggaatcgccgtatataaagcagctgctcttactagtaaactcgtacaggcgggcgcaaatgtaagagtgattatgacggaatctgcccgtgagtttgtgtctccgcttaccttccaagctctgtctcgacatgaggtgtatgtggatacatttaaagaaaacaatccaaaagtcattgcgcatattgacgtagctgactgggccgatctcattcttgttgcccctgcaacagcacatacgattggtaaaatggcggcagggcttgcagatgatatgctcacgacgaccttacttgcttcaaccgctcctgtatggatcgcaccagcaatgaatgtgcatatgtatgatcacccggctgtaaagcggaacattcgcacattatatgaggacggctaccggtttattgagccgagtgaaggttatttagcctgcggctacattggaaaagggcggttagaggagcctgaaaaaattgttgagcacatccgtgcattttttgaagagccaaaaagcttaccgctttcaggtaaaaaagtcgtggtgacagcaggtcctacacgagaagtcatcgatcctgtgcgtttctttacaaatcgatcgtcaggaaaaatgggctatgcgattgcagaggctgcgcagcaaatgggggctgatgtcacgctcatttcaggacctgtttctttaacggcacctgaccatgtacatgtggtgcacgttgaatcggcagaggacatgtatcaagccgtattagatgtgtacgaggaagcggaccttgtcattaaatcagcagcggtcgccgactatacccctgtgacatcatatcctcataaaatgaaaaaacaggacggcgccttagagattgaattcacccggacaaaagatattttaaaagagctggggaaaagaaaagagcatcaagtgcttgtcggttttgcagctgaaacgcaggatgtagaatattacgcgaaaaagaaaatcgaatccaagcatttagatatgattgtggccaacaacgtcacaaaagaaggtgcaggctttggcacagacacaaatgtagcagcaatcatcaaagcagatggtacaacaaaagagctgccgatgatgagcaaaaaagacctcgcttttgaaatcttaaaggaggcaaaacagctgttgccaaaagagcgtgatcgagcatgattgctgaagtcatcgtggatgtcacaacgaaagccattgaccggccattcgattaccgtgtaccagatcgattcaaagatctcgtcaaagcgggaatgagggtggtcgttccctttggcccaaggaagattcaagggtttgtgacaaaagtcaaagacgaaacagacataaagacaggaaacatcaaggacattgtcgatttatttgatttatcacctgttctgacagatgagctattggagctttcccactggctgacggaaaaaacattgtcctatcacattacggcacttcaatcgatgctgcctgcagccatgaaggcgaagtatgaaaaagaaattcaggtgctgtcagatgaagaacttccgcagtcattgaaagagcttttcggtcagcgagatagcatcctttacgctgacatcccggccgaacaactaaaacagattcaaaagcatgtccaaaaaggtcatctagaggtaaggtatcacgtctcgcaaaaatctggaaagaaaaaggtgcgcatgctccatctagctgtatcgaaagataagcttgaagaaaaacaacagcagcttaagaaaaatgcggtgaaacaaaaggcactgctctcctttttgcttcaagcgagtgagacgacctttttagcgaaagacttgcagcagcaaacaggcgcgagttctcaaacgcttaaaacctttattcaagaagggctgctaacagaaagctatgaagaggtctatcgtgatccttatcgtgaccgggcgtttacaccatctgcttcacttgatctcatgccagaacaagcagaagcggcaaaacatattcatcaagcagtcagtgatgaccggcatgaaacctttctgctgcacggggtgacaggaagcggtaaaacggaaatatacttgcagacgattgatcatgcccttcaaaaaggaaaagaagcgatcgtcctcgttcctgaaatctcgttaacccctcaaatggttcagcggtttaaagaacggttcggctcaaatgtggctgtacttcacagcggcttatcgacaggggaaaaatatgatgaatggcggaaaatccaccgcaaggaagtcaagcttgtcgtgggcgcgagatctgctgttttcgctccatttgaaaatctaggcatgattatcatagatgaagagcatgaatcttcttataaacaagaagaaatgcctcgttatcatgccaaggatgtcgccattgaacgagccagaaggcatcgatgcccagtcgttttaggcagtgcaaccccttcacttgaaacctacgcgcgtgcgaaaaaaggcgtgtttacattgctgacgcttaaacatcgcgtcaaccagcagcagctgccgcacgtttcgttaattgatatgagagaagaattgagaaatggcaacaggtccatgttttcagaagaattaatgctcagattaaaggaagtgcttgaaagaaaagaacaagccgtcttatttctgaataaaaggggctattcatcctttgtgatgtgccgtgattgcggatatgtggagcaatgtcctcattgcgaaatttctctcacctatcaccgctatcaaaaacggctgaaatgccattattgtgggcacgaagcaccggtgcctgctgaatgtccagaatgccatagtgagcatattcgctattttgggacgggtacgcagcgtgtagaagaagagcttacaaaagtactgcctgaggcaagagtgatccgaatggatgtagatacaacgtctcgtaaaggtgctcacgaaaagctcctcacgtcttttggcaataaagaagcggacattttgctcgggacgcaaatgatagcaaaagggctagatttcccagatgtcacacttgttggtgttctcagtgcggatacgtctcttcatattcctgattttcgttcaagtgaaaaaacatttcagcttctcacgcaggtcagcggcagggcaggacgtcatgaaaaagcgggttctgtgatcattcaatcgtatacgccttctcactatagtattgaattaacgaagcagcatgactatgaagccttttatgaacaggagatgctgcatcgccgccaccagtcctatccgccgtattactatttggcaatggtgacggtatcacacgaggaagtgacgaaggcagcgcatgtcactgatcaaattgtccagttcctaaaaatgaactgtgcaccgaatacaagaatccttggtccggctgcatcaccaatcgctaagatcaaagatagatatcgatatcaatgcgtgataaaatacaaaagggaaaatgaactggcaagtttactacggaaaatacaagatcattatcaaaaggaaatggaacaaaaacaattgatgatttcaatagatatgaatccatatatgatgatgtaaaacggagggctttaagtggcagtaaaaccaatagtcatacatccggcagaagtacttgaacaaaaggcagagcctgttgatacgttcgataaaaagctcaaaaaactgcttgatgatatgtatgatacaatgcttgagctagatggagtcggactagcagcaccacaaatcggcatttcacaaagaatggctgttgtcgatatcggagaggaacctggcagaattgatttagtgaatcccgaggttcttgaagtgaaaggaagtcaaacagatattgaaggctgcctgagctttccatctttatacggcacagtagaaagaccgagctatgtgaaggtaaaagcctttgataagaaaggcaaaccatttacaatagaagcagaaggatttttagcaagagccttattgcacgaaattgatcatttagacggtatattattcacgtcgaaaatcattcaaacctatacagaaaaagaacttgcggaaatggaagggtgaagaaaatggcacgtattgtatttatgggaacccctgatttctcagtacctgtgctgcaaacactcataacagaaggatacgaagttgtcggggtcgtcacgcagccagatcgcccaaaaggcagaaaacgagtactcacaccgcctcctgtgaaagtagaagccttaaagcacggcattcctgtactgcagcctgaaaaggtgcgtcttgatgaagaaattgataaagtgctttcattaaagcccgatttaattgtaacggcggcatttggacaaattctaccaaaacgattactggatgaacctcagtttggctgtatcaatgttcatgcctcactgctgccagaactaagaggcggcgcgccgatccattatgcgatccttcaaggtaaaaagaaaacaggcgtcaccatcatgtacatggtggaacgactcgatgcaggggacatgatcagtaaagtagaagtagaaatcgacgaattagacaatgtcggtacattacatgacaaattaagtgtagcaggcgccgcattgctgaaagatactgtgccaaatgttctgagcggatctatttctccaattccgcaaaatgaagaagcggcaacctacgcacctaatataaagcgagagcaagaaaggttagactggacaaagaccggagaagagctttacaaccaagttcgcggcttaaatccatggccagttgcctatactgaatggaacggggctcatctaaaagtatgggaagcgaaaaaagttccacttcaagtgcaagaagaacctgggaaagtgattgagcttcaaaaagaaggtccggtcattggaactgggaataagcaaggccttttattaacaggtgtgcagccagctggtaagaaaaaaatgagcggcgaagacttcttaagaggcgcaaatatcgaaattggacagaaattagggttaatgaatgaagaaaagtaatgtgagagaagtagcgctggacgctttaatcaaacttgaacaaaaccaagcttacagtaatttgcttttgcagtcagtcatgaaagacaaagacttggcagatcaggacaaaccgctcttaacagagcttgtgtacggtacactgcaaaataagctggcattagattatatgctggcgccatttgtgaaaaaaccgcaaaaggtggctccatgggtcatgcagcttttgcgaatgtctctttatcaaatggtctaccttgaaaagattccagaccgtgcagccatccatgaagcagttgagctaacgaaaaagagagggcacaagggcatttcttcacttgtgaacggcgttcttcgttccgtgcaaagagaaggtgttccggcttttgatgacatcaaagatccggtcaagcggctttcaattgagacaagccacccattatggctcgtgcaggaatgggttcagtcgtacggatttgaagcggcagaaagcatgtgccgcattcatttagtaccgccaaagcaaaccctccgtgtcaatcgaatgaaaaccggccgcgcggcattgcagcaagaactgctggatgccggaatcgaaacggagctcggcgacttatctgaagatgcactcaagctgatgaaagggtccatcgtttcaaccccttcttttcaagaaggctatgtgaccattcaagatgaaagctcaatgcttgtcgcaagagcactagaccctcagccgggagaaacagtgcttgacgcctgtgcggctccaggcggaaaatcaacacatatcgcagagcgtatgaacgacgaaggacaaattgtttcacttgatttacatgaacacaaagtgaaactcatcaaacaagcagcaaaacgcctgaaccttactcagattgaggcaaaagcgcttgatgcgaggaaagcgaaagactattacagcgaagcttcatttgaccgtattctgattgatgcgccgtgttctggttttggcgtcatcagacgaaaaccagatatgaaatatactaagtctccagaagactcagcaaggcttgctgctattcagcaggcaatcttaaaagaagcagctccgcttttaaagcctggcggatcccttgtatatagtacatgtacaatggacccaacagaaaatcaacaagtgattcatgcgtttttacaagaacaccaagacttcgaacccgatctatctcttaatgaacggctgcctgagcaggttgctccgtttgttcaaaacggaagtgtacaaattcttcctcattatttcggaacagatggtttctttatttgcagcatgagaaagaagggataaaaaatgacagaacaaaaagtaagaaaagaactgaaaacagatatgccgtcgatttattcatttgagcttcacgaaatgaaagaatggttaaaagaacaagacgaaaagcctttccgcgcagctcaaatttttgagtggctttatgagaaacgtgtgacatcctttgatgaaatgtctaacctctccaaagatttaagagaaaaattaaaagatcaatttacaatcacaactttaaaaaccgtgatcaaacaaacgtctcaggacggaacgatcaagtttttatttgaactgcatgatggctatacaattgaaacagtgcttatgcgtcacgaatatggaaactctgtctgtgtcacgactcaggttggctgtagaattggctgtacattctgtgcatctacacttggcggtttaaaacgaaaccttgaagcgggagaaatcgttgcacaagtattaaaagtgcagcaggcacttgacgaaacagatgagagagtcagctctgttgtcatcatgggaattggcgaaccgtttgataactttgaagaaatgcttgccttccttaaaatcatcaaccatgacaacggcttaaatattggtgcacgtcatattacagtttcgacaagcggaatcattccaaagatttatcaattcgctgatgagcaaatgcaaatcaactttgctgtatctctgcacgcaccgaacacagagatcagaagccgcctgatgccgatcaataaggcatataagctgccaaaattaatggaagccattgaatactacattcaaaagacgggtagacgtgtcagctttgaatacggcctgtttggcggagtaaatgatcaagttcaccatgcggaagaacttgcagaccttttaaaaggaatcaagtgccacgtaaacctcattccggtgaactatgtaccagagagagattatgtgagaacacctagagaacaaatcttcctatttgaaaaaacgctgaaagaacgcggcgtaaacgtaacgattagacgagagcaaggccatgacattgatgctgcttgcggtcagctaagagcgaaggagcgtcaggaagagacgaggtgacgaatgttgataagggcagcctttctaaccgatacaggaaaagtccgtcagcataatgaagatgatgcaggtatttttgaagcaaaagaagactcacttctcgctgttgtagcagacggcatgggaggtcatcttgctggtgatgtcgccagcaagatggcagtctcttctttgaaagaatactgggaaaaaacatcttcaattccagaaaagccagccgatcaagaaagctggttaatctcaaaaatcagtgacattaatgaccaagtatatgaacatgcgaaaaacaatgaggagtgccaaggaatggggacgaccattgtgtgtgcgctcgttcatttgcaaacggtcacaattgcgcatattggagacagccgctgctacctgctaagagaaggagcgctgacccaattaacggatgatcattcacttgtgaatgaacttgtgaaaacaggtgaaatttcaaaagcggatgcagaatatcatccaagaaaaaatgtgctcacgaaagcattaggaacagataaacgtgttcaaattgatgcacgcacctttgaagtggacccaggagatcaaatcctgctttgctcagatggtctatcgaataaagtagaagaagagaatttgattcatattttaacgcaaacgaacgcaccagaggaaaaagtaacagagttaattcaaacagcgaatgacaacggcggtgaagataacattacagcagtactgttagaaatctcctcccagccagaggagggtgacagcaagtgttgatcggaaaaaggatcagcggccgttatcagattcttcgcgtcataggcggaggcggaatggcaaacgtctatttggcggaggatatgattttagatcgcgaagtagcgattaaaattttgcggtttgactttgcgagcgatgatgattttattagacgattccgacgggaagcgcaatcagctgcaagcttagatcattcgaatattgtcagcatctacgatgtaggggaagaagatgatatttattatattgtgatggaatatgtcgaggggatgacgctgaaagaatacatacacgccaatggcccgcttcatccgaaagaagccgttcgcatcatggagcaagtcgttgcggcgatggaagaagcccatgcgaaacagctcgtccaccgtgacattaagcctcacaatatattaatagacaatatggggaatatcaaagtcactgattttgggattgccatggcactcagctcagcgaccattacccatacaaattctgtcctaggctccgtgcactatttgtctccagaacaagcacgcggaggtcttgcaacgaaaaagtcagacatctattcgcttgggattgtgctttatgaactcatctcaggacgcatgccatttgaaggggaatcggctgtcagtgtcgcactgaagcatttgcaatcagagcctccatctgtgaggagatggaatccttctgttccacaaagcgtggaaaacatcattttaaaggcgatggccaaagatccattttatcgatatgaagatgcatctgaaatgcaaaaagacttaaaaaccgctttcgatccagccagattaaaagaaaaacgctttgtcattgaagaagaccatgaagcaacgaaagcgatcccaatcattcaagatcatctaatcgatcaagacaatgaaaaaacagctgtccacccggctcaaaaaccgaagaaaaaagagaaacaaaagccgaaaaagaaacgaaaaaaatggccatggattgtggcatccatcttatttattttgaccgctgcgacgattttagccatcactgtgtttccagggctgctttttccaaaagatgttgaggtcacggatgtatctggcatgacggttgaaaaagcagaagataccttgaagaaagctgggttcaccgtcgcttcggaaccaattgagatcgctgatgagaaaattgaaaaagggcttgtcgtcaaaacagatccgaaaatcggcacaaaggtaaaagaagggacagaaattcagctttacgaaagtactggcaaggaaaagaccgaattacctgatgttacaggcgaaaaggtcgataaagcaaaagaattattagagaaaaaagggtttaaacaggtcgttgtggaggaagtgaatgataatgacaccgaatctgggattgtcatggaacagaatccttcagcgaatacagagcttgtagcagcagatgaagaagtcacgttgactgtcagcataggtcctgccgatattacattacgtgatttaacgacgtatagtaagcaggcggcatcgaattatttagaggataacggattaaagcttgatgaaaaagaagcgcattctgacgatgtgccaaaaggcgaggtcatgaagcaggaaccaggagcaggaactgctgttaaaccaggtgatacggttaagattacattctctcttggaccgaaggaaaaaccagccaaaacggtgactgaaaagattgcgatcccttatgaaccagaaacggaagggcaggagatgaatgtccaaatttccattgatgatgcggagcatagcatctctgattcatatgaaagctttaaaatcactgcgccgactgagcggaccattaagtttaagattgaaccaggtcaaaaaggatattatcaagtgacggttgatgataaagtcgtaagctctaaaacgatcgaataccctgatgatgaataaaggagggactttatgcctgagggcaaaattattaaagcattaagtggattctactatgtgctggatgagtcacaagaaagtggaaaagtggttcagtgcagagcaagaggcatttttcgaaaaaacaaaatcacacctcttgttggagattatgtcgtgtatcaagcagacaacgataaagaaggctacttattagaagtaaaagaacggacaaacgaacttgttcgtccgcctattagtaacgtcgatcaagcggtacttgttttctcagcagcagaaccaacctttagcacatcactcttagacagatttttagtgcttgttgaagccaatcatattgagccgattatctgcatcactaaaatggacttattgaaaacagatcaagagcgtgaaactatcgaggcatatgcagacgactatcggcaaattggctatgatgttcatttaacctctacgatggagggagacggaattgagaagctgaccccgcattttcacaataaaattacggtatttgccggtcagtctggtgtaggcaagtcctcccttttaaatgcgatgagtcctgaattggcgctgaaaacaaatgatatctcatcccatctcggacgaggaaagcatacgacaaggcatgttgaacttattcgaacagcagacgggctcattgcagatactcctggctttagctcgctcgaatttactggcatcgaagcagaagatctaggtctatactttttagacatcagagagcggagtgcagattgtaaatttagaggctgcctgcacgtgaaagagcctggctgtgcgataaaagatgcggtcgagcatgatcaaatcagagagtatcgctatcagcattatttagagtttttaactgaaatcaaagacagaaagccgaggtactaaatcatggtttatattgccccttccattttatcagcagattttgccaatttggagaaagatatccgtgatgtggaacaaggcggtgcggattacattcatatcgatgtcatggacggtcattttgtaccgaatatgacatttgggccgaatgttgtcgaagcgattagaccgcatacgcgtcttccgcttgatgttcacttaatgattgagcagccagaccggtatattcctgcattcgcaaaagcaggcgctgatattatttctgttcatgtggaagcttgtccgcacttacaccgaacaatacagcacattaaagaacaaggtgtaaaagcaggggtcgtcttgaatcctcacacacctgtttctcacattgagcatgtattagaggatgtggaccttgtgttattcatgacggtaaatcctggttttgggggacaagcatttattccatctgttctcacgaaggtaaaagaagtaaaagcactgagtgaacaaaagggcttaaccgatttactgatagaaatagacggtggtgtcaatgtagaaactgcaaaggattgcaaagaagcaggcgctaatttacttgtagcgggctcagcggtatacggtaaagacaaccgcgcagcagcgatccaggcaattcgagaagcgtaaagaaaggaaccaaagtcattgtgatctttggttctttttatatagagaggagcgtatatcatgcacatacatatcgtagccggcggtccttttggatacattccgccacttgaacatgaagcatcacagaaggatattctctggattggcgtagaccgtggaaccctcttcttactagagcaaggcatcatccctgccaaagcctttggtgattttgacagtgtgacagaagaagagcttcgggagctgaaagaaaaattgcctgccctgaatgtatttcaagctgaaaaggatgaaaccgatttagagcttgcactgaactgggcattgagtcagcatccagcacatatttacatctacggtattacgggaggaagggctgatcattttctaggaaatatccatcttctttacaaagggattcagcacaagcagaatatcacccttgtagacaaacaaaatatcattcaaatgtttgaacctggtacatacgaaataaaagaagatcaggataaaaaatatgtgtcgtttctaccctttggaacaccggttgaaaagctgacattaaaaggtttcaaatatcctctgaaaaattgtcatattgagcctggttccacactatgtattagtaacgaactcatccactcaaatggtactttttcttttcatgaaggcatattaataatggtaagaagcaaagattgaccaacctatcaatgtggatggctgattaagctcaattgtgctgcaagcggtacttttaggagggggacaaaatgaaattttatacaatcaaactgcctagatttcttggcggcattgtccgtgcgatgcttggttcatttaagaaagattaatgagtaatctcctttatttccacataaaaacgcctgctacaattaattgtagcaggcgtttactcttgcttatacacgctcaactttaccagatttcaaagctcgagctgatacatatactcttttaggcttaccgtccactagaatacgaactttttgaaggttcgcgccccatgtacgttttgtagagttcattgcgtgagaacggttgttcccagcttttgtttttctgcctgtaataacgcatttacgtgccatttgtttccctcctaactgcgaaaacatcatcatattcttcatatacgtacttagagatgcctcaagatactttaataatttaccacagcttcaaggggtttgcaaggattgtttactcctctttcaagaaaaataccttgacatcttgataaaaaatcgaggctatagtataagtaggattgggtcggattgaatgatttcttttaaaaagaagggtcttatagtaaaatagtgataactcagggcaatttctcaaaaagggggaaccaatgtgtccattgaacttagaacgaaatacggacaaattgatatatcaaatgaagtcattgcaatggtggcaggaggcgctgcgatcgattgttatggtattgttgggatggcgtccaaaaatcaaatcaaggacggcttgacggatattctccgcaaagagaacttcagccggggtgttcttgtgcgtcaaaaagaagaccgcattcatattgatatgtacatcatcgtcagctacggtacaaaaatatcagaagtcgcacataatgttcaaacgaaagtcaaatatacgatttctcacacagttggactttctgttgattcggtcaacatttatgtacaaggagtaagagttacgaacccgtagtaaggaggaaatatattgtctattagaaatcttgatggccgctcatttgcaaaaatgattcttgcaggtgctcaccatctttctcaaaacgcacaaattgttgatgcgttaaatgtttttccagtgccagacggagacacggggacaaatatgaatttgtcgatgacttcaggggcaaaagcagttgaagaaacaaataccgatcatattgggaaggtcggcgtggccttgtcaaaagggctattgatgggcgcaagaggaaactcaggcgtgatcctttcacagctctttagaggtttcagtaaacatattgaacaaaaagaaacgattgatgcaaaagaatttgcccttgccttacaggcaggtgttgatacagcatataaagccgtgatgaaaccgattgaagggaccatcttaacggttgcaaaggatgcagcaaagaaagcggttgctgtttcagcggtagaaaatgacattgaccgcgttcttgagttaacgattgaggaagcgagagcatcacttgatcgaacgccggatctgcttcctgttttaaaggaagtgggcgttgtcgatagtgggggtaaaggacttctgtgcgtatatgaaggtttccttgcttcattaagaggagaggacctccatctgaaagcggcctctttgccaacgttaaaagaacttgtcagtgcagagcatcataaaagtgcacaaagccatatgaacactgaagatatcgaatttggttattgtactgaatttatggtgaaatttgaagaagacaaacagtcctttgatgagaatgccttcagagaagacttaagcgaattcggagattcacttcttgtagtgtctgatgaaacgctggcgaaagttcatattcatgcagagcagcctggagatgtcttatcctatgcacagcgctacggcagcctgatcaatatgaaaattgaaaatatgagagagcagcatagctcgattgtgaacgaagaaagagaacacgcgcccgctgcaccaaaggcacctgctgctgaaaaacagcgctttggagtagtcagtgtcgcaatgggagaaggaattgctgacttgtttaaaagtatcggagcttccgtcgtcattgaaggcggacagacgatgaacccgagcacagaagacattgtcacagcaattgaaagcgtacatgccgaaaccgtctttatcttacctaataattctaatattgtcatggcagcgaaacaggcggcaactgtctcaagtcgtgaggtcgttgtcattccgacgaagaccgttccccaaggaatgtcggcacttctttctctaaatgaagcagcttcaaatgaagacaacgaagcagcgatgctagaagcgattgaccacgtgaaaagcggccaaattacctttgcagtaagagatacccaaattgatggtattgatattgccaaaggcgattatatgggtctctttaacgggaaaattaccttaaccgcgaaaaatcaattagatgcagcaaaagagcttttgaccaaaatggtgacagaagatgatgagattgtcacgatcattaaaggggaagatgcatcatctgaagagatggatgcgttagaagcctttattgaagaaacatttgaagaggtagaagttgaagtccacgatggaaaacagccgctttattcatatattttggctgttgaataacgaaagaagggcaaataaagcccttcttcttcttttgcaattttttactagtgattcaacggtgaaatgagttgcgggaaacgaatgaatccattagtctaaagaaagaaccaaaccaatatgtgagtggttatgagaggggaagacctatgaaatttagaagtgtgtttgatattattggacccgtcatgattggtccatcaagttcgcacacagcgggtgcggctcgtataggaagagtggctcgcagcttatttggaagagaaccgaaacaaattgtcgtttcattttatggctcttttaaagatacgtataaaggacacggtacagatgtcgccattatcggcggtgttcttgactttgatacatttgatgaacgcatcaaaacagcgattgatattgcaaaaagcaaagagatcgacattgaatttaaagaagaagatgcggtgccagcgcatccgaatacagcaaaagtagagatatcagatgcaaatggaaagcttgaattaatcgggatttccatcggcggtggtaaaattgaaatcactgaactgaatggctttgagctcaggctttcaggaaatcatcctgccattcttgtggttcataacgatcgctacggcacgattgcagcagtggccaatgtgttagcgaaattcgccatcaacatcggtcatatggaagtggcacgtaaagatgtcgggcaagaggctctgatgaccatcgaagtggatcaaaatattgacccagctgtcctatcagagcttgaaacgctgccaaacattattcaagtcacacaaattgcagagtaacaacaaggaggttatgaatgatgtttaaaaacgtcaaagaactcgtgcagctaacagaagaacggaatacctccatttcagaaataatgatcgcgcaagaaatggaagtgacagggaagtcacgtgaagatattttctcccagatgtaccgcaacctagaagtgatggaacaggccgtagaaaacgggctgaaaggtgtgaaatcattatcaggtttaacaggcggagatgcggtcaagcttcaagcatatatcgcatcaggcaaaacgctgtctggacatacaatattagatgctgtcagtaaggcagtggcaacgaatgaagtcaatgccgcaatggggacgatttgtgcaacgcctacagcaggctcagcaggtgttgtgccgggtacgttatttgcagtaaaagaaacattaaagccaactaaggaacaaatggtcagattcctattcacctctggcgcatttggctttgttgtggccaataatgcgagcatctctggtgcagcaggcggctgtcaggcagaggtaggttcagcatcaggtatggcggcagcagccattgtcgaaatggcaggcggtacacctcagcaatctgctgaagcgatggcgattacactgaaaaatatgcttggacttgtttgtgacccagtagctggacttgtcgaggtaccgtgcgtaaaacgaaacgcaatgggtgcatcaaatgcgatgatcgcagcagatatggcacttgccggcatcacaagccgtattccatgtgatgaagtcattgatgcgatgtataaaatcggtcaaaccatgccaacggcacttcgtgaaacagcacaaggcggacttgctgcaacaccgacagcaagagagcttgaaaagaagattttcggaggtgtgacctcatctcgtgatacagaaactgcaagataatgtctctgtcctcaaagggattggagaagaaaccgaaaaaacactcaatgaacttggaatctatacagtagccgatttgcttggctattttccttatcgatatgacgactatgagcttcgtaatttagaagaagttaagcatgatgaacgtgtcacaattgaagggaaagtgcacagtgagcccgtcctcacctattatggaaaaaaacgaagcaggctgacattcaggctgcttgtcgggcgttttctcatcacagcgatttgcttcaatcgcccttatttaaaacgaagccttgttttaggtgatacagtatccgtcactgggaaatgggataaaaaccgtcaatccatcatggtgcaggaatttaaaaaagggacgcacgagcaagatggcagtatagagcctgtttattcagtaaaagaaaatgtaaccgtgaagatgatgaggcgttttgtaaaacaagccctgtcactttatgtagacaaagccgaagatccactgccaaagcagcttgcctttgcctataaactcatgtcctatcaggaagcgttaaaaaccattcatctaccagaaacaagagactcgctcaagcaagcaagacgccgctttgtgtacgaggaatttctcatctttcaattgaagatgcaggcaatcagaaagaaagagcgagaaaaaacatcaggcatccagcatccgttttccaaagaggctgtttttgagtttgttcacagcctgccatttccgctgacaaaggcacaatcaagagtgcttgatgaaattatgtctgatatggcatccccgtaccggatgaaccgtctgcttcaaggggatgtaggctcagggaaaacagctgttgcagccattgcgctttatgccgctcatttatccggctatcaaggtgcattgatggtcccaacagagattttggcagaacagcatgcagattcactttaccagctgtttgaaaaatggggactgaatatcgcccttctgacaagctctgtgaaaggaaagcgccgcagagaattgctggaacgtctaaaagagggcgagattgatatattagtcggtacgcatgcgctcattcaagacgaagtcgaatttcagcagctcggtcttgttatcacagatgagcagcaccggtttggcgtagaacagcgaaaaaaactaagaagtaaagggcaggacccagatgtcttgtttatgactgccacacctattccgcgaacacttgcaatcactgtctttggagaaatggacgtatccgtcattgatgaattaccagccggcagaaaacagatcgaaacgtattgggtcaagcatgacatgcttgagaggattcttgcatttgtggataaagagctgagaaaaggaagacaggcgtatattatttgtccgctcatagaagaatcagacaagctggatgtgcaaaatgcgatcgatgtccacagtatgctgacagaggcttaccgcggtaagtggtcgatcggcttaatgcacgggaaactggcgagtgacgaaaaagatcaggtgatgagagactttacagcaaatgaagttcaaattctcgtttcaaccacagtcgttgaagtcggggtcaacgtaccgaatgcgactatcatggtcatttatgatgcagaccgcttcggactgtctcagcttcatcagctcagaggccgggttggacgcggagagcatcaatcattttgtgttttaatggcggatccaaaatcagaaacggggaaagagcggatgcggatcatgtccgaaacaaccgacggttttgagctgtctgaaaaggacttagaactaagaggacccggcgatttcttcggtaaaaaacaaagcggaatgcctgaatttaaagtagcagatatggttcatgactacagagcgctggaaaccgctagaaaagatgcggcagaacttgtgcaatcagacgcattttggacagaccccgaatacaaagaacttcggcaaacacttgtagacagcggggtgctgggcggagataaattaagctgatcaagcgctggaggaattttcttgtctttttgaaacaaggattgatttatcatctatgagattatatactactattagtacctagtcataaatgtacggatggtgtctgcatatgaaactaaataaaaaagaacgtcaaaagcttctccagcaaacgatcagctcgactccgttcattactgatgaagaattggcaagtaaattcggtgtaagcattcaaacggttcgtcttgatcgtttggaactgtcgattcctgaattacgcgaaagaattaagcatgtggccgaaaagacattagaggatgaagtgaagtcacttccgctggatgaagtgattggagaaatgattgatgtagagcttgatgaccaagccatttccattttagaagtgagaaaagagcatgtatttagccgaaatcaaattgccaggggacatcatctcttcgcccaggctaattcgctcgcagtagccgtcatcgacgatgaactggcgctgacagcaaaagcgaatatcagatttacaaggcaggttaaacaaggcgaacgagtcgtctcaaaagctaaagtagcctcacatgataaagaaaaaggcagaactgtagttgaagtaaacagctatgtcggtgaggaagttgtcttctcaggtgacttcgtcatgtatcgctcaaaacaaaagtaaaaggtggcacgtaatatgagaattgcagtcgatgcaatggggggagaccatgcccctaaagccattattgacggtgtgcaaaaaagcttaacggcattttcagatatcgagattacacttgtcggcgatgaaaacaaaatcaaaccatacataacaaataacgagcgcatcacgattttagatgcaaaagaagtcattgaaccgacagatgaaccagtgcgtgcagttagacgtaaaaaggattcatctatggtgaaaatggcgcaggaagtatccgagggacgtgcagatgcctgcatctcagcaggaaatactggagctctcatgacagcaggattgtttatcgtaggcagaatcgacggcatagacagaccggcacttgctccaacactgccaacacttgatggcagcgggtttttattactggatgtcggcgcaaacgttgatgccaaaccagaacacctaatgcaatatgccatgatgggatcaatctacgcagagcgtgtctttccaaagagcaatccgcgcgttggattgttaaatgtaggaacagaagataaaaaaggtaacgatctcacgaaaaaaacctttgaattattaaaagcatcagacttgaatttcgtagggaatgtggagtctcgtgatttactagaaggtgttgctgatgttgttgtcacagatggtttcacaggaaatatcgccttgaaaacgattgaaggcacagccctttctgtatttaaaatgctgaaagaaacattaacatccagcttcacagcaaaaatagcagctggcatgatgaagccgaaattgatgcagatgaagtctaaaatggattactccgaatatggcggtgccgctttatttggtttaaaagcacctgtcattaaagcacacggctcctctgatgaaaacgccatttttcatgcaattcgtcaggcacgtgatatcgtagaaaaagacgtttcagccatcattcatcaagaagtccaaaaagaaaccacgaacgagtcttaatggaggtaaagcagcatgactaaaattgcatttttattccctggccaaggctctcaaaaaattggcatgggaaaagatttatttgaccaagaagcagtatctaaagctgtatttgaagaagcagacaagaccctcggttttgacttatcttcgatgatttttgaaggagatgcagaagaactgacgctcacttataatgcgcagccagctcttttaacgacaagtatcgccatcttaaagaaatttgaagagagcggaatcaaagcagattacgcagcaggacatagccttggtgaatatacggccctcgttgcagcaggcgcactttcgtttcaagatgctgtctatgcagtaagaaagcgcggcgaattaatgaacgaagctgttccagcaggagaaggcgccatggcagcgattcttggcttagatcaagcggcgcttctagaagtgacaaaagaagtgacagagagcggtcaccttgtagaactcgctaacctaaactgtcctggtcaaatcgtcatctctggtacagcaaaaggtgtagaactagcttcagagaaagcgaaagaaaaaggcgcaaaacgtgcgattgcccttgaagtgagcggacctttccattctgccttaatgaaaccagccgctgaaaaattcacagatgttctgtcaaagctagacatttcggatgccaaaacaccagtgatctcaaatgtaacagcagacatcgtcacatctcgtgatgctattgagacaaagctcattgaacaattgtattctcctgttcgatttgaagaaagtgtggaacgcctcattgatttaggcgtgacaacgtttattgaaattggtccgggcaaagtactttcaggccttgtgaaaaaggtcaatcgccgcctgacaaccatttctgtttcagatcaggaaacaattgaagcagctattcaaacattgaaggaggattcttgatgctgacaaataaaacagccgttgtaacaggtgcatcacgcgggattggccgttccatcgcgatcgatttagcgaagaatggtgcaaatgttgtcgtcaactattctggaaacgaagcaaaagcaaatgaagtcgtagacgaaatcaaagcacttggccagcaggcatttgccgttaaagctgatgtttcaaatgctgaagaagtacaagcgctcatgaaacaagcaattgacacatttggttcaattgacatccttgtcaataatgcagggatcacaaaggacaacctgctcatgagaatgaaagaaaatgaatgggatgacgtcattaacataaacttaaaaggggtctttaactgtacaaaagccgtgacacgtcaaatgatgaaacagcgcagcggaagaatcatcaacttggcttcagtggttggcgtatgtggaaaccctggacaagcaaactatgttgcagcaaaagctggcgtcatcgggttaacgaaaacaacagcaaaagagctggcaacccgtcatattacagtcaatgcagtagcaccaggctttatttcgacagatatgacagacaagcttgatgagaatgtgcagtctgaaatgctcaaacaaatcccgcttgcacgctttggtgcacctgaagatattagcaacgtcgttgtctttttagcttcagaaggagcaggttatattacaggccaaaccatccaagtagatggcggaatggttatgtcctaagaaatatcaaaatttcattaggttttctctagttttttaaaaacgaatcaactataatactttgaggggaggtgaaaggcaatggcagacgtattagagcgtgtatcaaaaattattgtagaccgccttggcgttgatgaggctgacgtgaaaatggaagcttcatttaaagaagatttaggcgctgattcccttgatgtagttgagctagttatggaacttgaagatgagttcgatatggaaatttctgacgaagatgctgaaaaaattgcaacagtcggtgacgctgtgaactacataaatagccagcaataagcgtaacaaagtcccgtctattttcatgacgggactttgaaaatttatgttagtttcaacacattcagctgatcaattgtcagcctttttcagatgctaaggagcaatgtttccttgcatgtagaaagagagactccatataatcagtatccttaaaggcgattaagcctacctggaggttgctatgccaaaacactataaagacaaacagaaacagagcaaaaaactagagcaatttagagagttccagcagcgcatttctgtacactttcaaaatgaaaaacttctatatcaagcctttacgcattcctcttatgtgaatgaacaccggaaaaagccatacgaggataatgaaagacttgaatttctaggagatgctgttttagaattgacgatctctcaattcttatttgcgaaatatccagcgatgagcgagggagatttaacgaaactgagagcggcaatcgtatgtgaaccgtcacttgtgtcactggcacatgagctgtccttcggagaccttgttcttttaggaaaaggcgaagaaatgacaggcgggagaaaacgcccagcactcttagcggacgtattcgaggcgtttatcggagcactttatttagatcaggggctggagccagtggaacgattcctagttgcctatgtctatccgaaaattaacgatggagcgttctcgcacgtcatggactttaaaagccagctgcaagaattcgttcagcgcgatggaaaaggtgtactggaataccacatcctgcatgaaaaaggaccagcacataaccgggaatttgaagcaaatgtatcccttcgcggagaagtgctcggaattggaaatggccgctctaaaaaagaagcagaacagcatgctgcacaggaagcacttgctaaattgcagaaacatcatatgaaccaataaaatccccctcgtcattcagggggatttcactctgttttccatcatcttttttcacttcatatggtaagatgatagtactttaaatacataaggaggatcactctcatgttcctcaaacgtttagacgtgataggattcaaatcttttgcacagcgagtgaccgtggactttgtcaaaggggtcacagctgttgttggaccaaacggaagcggcaaaagtaatattaccgatgccatccgctgggtgcttggagaacaatcagcgaaaagcctccgcggaggaaaaatggaagacatcatttttgcaggaagcgactcaagaaaaagagtcaatctagcagaggtgactttaacattagataacgaagatcactttttaccgatcgattttcacgaagtcagtgtgacaagaagagtctatcgttcaggagaaagtgaatttctcataaacaatcaatctgtccgcttgaaggatattattgatcttttcatggattcaggtcttggaaaagaagctttttcgatcatcagccaaggaaaggtagaggaaattctatcaagcaaggcagaagagagaagaagcatctttgaagaagcggctggtgttttgaaatataaaacaagaaagaaaaaagccgagaataaactgtttgaaacgcaggacaacttaaaccgagtagaagatattctgcatgaactagaagatcaagtagaaccattaagaatgcaggcatctattgcaaaggactatttgcaaaaaaaagaagagcttgaaaatgtcgaaattgccttaactgtccatgacatcgaagcacttcatgaaaaatggacaacacttggtgaagctgtcgagcgcttcaaacaagatgaaatgaagcagtccacagatattcaagcaaaagaagccaaaattgaagagtcaagagaccgcattcaagcacttgacgaatcaattaatgacctgcaagaagttcttcttttcacaagtgaggaattagaaaagcttgaaggaaaaaaagaagtattaaaagaacggaaaaaaaacgcagcagcaaaccaaggacagctagaagaaacgctcattcgcttaactgaaaagcagacgcagttaaccgaaaagattcagcagcagaaaatcacgcgggacagccttcaaaaagaagtgcagcagctaaaagatgaagtgaaaacaaagcagcatcaactgtcgctccatagtgaagatgtggaaggtcaaattgaacagctgaaaagcgattattttgatctgctcaatgaacaggcttccatccgcaatgaacgtaaattactagaagaacagcagcgccaagcggccatgcagctggagcggcttacgcaaaacaaccaaaaacacatcgaagaacgtgtgtctgtcaaagaaaagaaaatagaagctgagcagcagctttccgcactagaagaagacatactgggtcaggtcaagcgctttagggaagcggaacaaaagcttgagcaaatgaaacgtcaatacgagaaaaaagaaacggctctttaccaagcctatcaatatgtgcagcaggcaagatcaaaaaaagagatgctagaatccatgcaggaagacttttcaggctttttccaaggagtgaaagaggtcttaaaggcaaaagagcgtttaggcggtattcacggtgccattgcagagctgattcaaacagatcagcagcatgagacagcgattgaaatcgcgctaggcgcagcaacgcagcacgtagtcacagaaaatgaagcagctgcgagacaagcaattgcatacttaaagcagcactcctttggacgtgcgaccttcctgccaatgaatgtgatcaaagaacgaaccattcagcatagggacgtccaaacagctgagcagcatgctgcatttatcggtgtagcaagtcaccttgtttcctttgatgaaaagtatcaaaaagtcatacagaacttgcttggaacggtacttatcgttagagacttaaaaggcgccaatgaactggcaaaaatgcttggtcatcgttatcgcatcgtgacccttgatggagatgtcgtgaactccggcggttcaatgaccggtggcggtgtaaagaaaaagaacaactcccttctttcaagaaaccgggagatcgaaacattaacaaagcagctcgttgaaatggaagaaaaaacaacgatccttgaaaaagaaacaaaagaaacgaagcaattgattgcagcaaacgaaagccaattaaacgaactgcgtcaacgcggagaaacccttcgagaaaagcagcaagagctcaaagggaagctatacgaactgcaagtagccgaaaaaaatattaatgctcaccttgaactctatgatcaagaaaaagaagaattgcagcagcgttctactgaacttacagataaggacaaaacgcaggcagcccttgaagtttcaataggggagaaactgaccacgcttgatcaagagatcaatacattaacaaagcgtaagcagactcaaagctcaacgaaagaaaccatttctgccgaattaacagagctgaaaatctcgctggccaaaaaagagcagtccttagcgaatgaacaagaaaagctttcgagcttaatggccgaattagaagaggctgaacaaacgctgatggaaacaaaagaagacctgtcactcttaacaagtgaaatgacgtctagctcaagcggagcagaacagctggaagaagcggcgaaagagaaactggaaaacaaaaacaaaacaaccgcacttatttcagagcgtcgtaaacagcgcctggctctttctgaaacgttagaatttgctgaacgtgaactgaaagagcaaaagcgcctttacaagcagctcaccacaagcttaaaagatgaagagattaagcttggccgtatggaagttgagctcgacaacctcatcgcttatttgaacgaagagtatgccctttcgtttgaaggggcaaaagagatgtatcatctgacgttatcaccagatgaagcaagaaaacgagtgaagctgatcaaattagccattgaagagctaggaacagtgaacttaggcagcattgatgagtatgaacgagtaaatgaacgctatctcttcttaacagaacagcgaaacgatctgacagaagcgaaaaatacattattccaagtgatcgaagaaatggatcaagagatgacaaagcgcttctctgaaacattctcgcaaattcgcgggcattttgaatcagttttccaagcgttatttggcggcggaagagcagatcttaagctgacagatccaaacgatttactaaactctggcgttgatattgtcgcgcagccgccagggaaaaaactgcaaaacttaagcctgctttcaggcggagagagagcattaacagcgattgctttactattctctattttaaaagtcagacctgttccattctgcgtgttagatgaggtcgaagcggcgcttgatgaagcaaatgttttccgctttgcgcaatatttaaagaaatacagccaggaaacacagttcattgtcattacgcaccgtaaaggaacaatggaagaagcagatgtgctctacggcgttactatgcaggagtcaggtgtttctaagcttgtatccgtcaaactagaagaaacgaaagagcttgtccagtaattaaaggaggtttttgaaccaaatgagcttttttaagaaattaaaagaaaaatttacgcagcaaaccgattcagtatcagaaaagtttaaagatggacttgaaaaaacgagaaactcctttcaaggaagagtaaacgaactaatttctcgctaccgtaaagtcgatgaagacttttttgaagaattagaagaggttctgatcggcgcggatgtcggtttcacaacggtgatggaactgattgatgagctgaaaaaagaagtgaaactaagaaacattcaagacccaagtgaagtacaatcggtcatctctgaaaaactggttgaaatctacaatagcggagaggaacaaatctctgcgctgaacatcgaagagggccgattaaatatcattttatttgtaggtgtcaatggcgttgggaaaacaacgactatcggcaaacttgcgaataagctgaaaaatgaagggaaatccgtcattttagcagcaggtgatacgttccgtgccggtgcgattgagcagcttgaagtatggggagagcgttcaggtgtccctgttgtcaaacagacggctggctctgaccctgcagcggtgatctatgatgccgttcaatcagcaaaagcgaaaaatgcggatgtactcatctgtgatacagcaggacgactgcaaaacaaagtcaacttgatgaaagagctagagaaggtcaagagagttattgaacgcgaggttccagatgcaccgcatgaagtactgctcgctcttgatgcaacaaccggtcaaaatgcgatggcacaagcgaaggaattttctaaagcgacgaatgtgacaggaattgctttaacaaagcttgacggtactgcaaaaggcggaattgtccttgcgattcgcaatgagctgaacatccctgtgaagcttgtcggtttaggtgaaaaggtagacgatctgcaagaattcgatgcagaatcgtatgtgtatggattattctcagacgtgattgatcaagaggactaacaaaaatgccggcaaaaactgctggcatttttatttatacaccgcttcatgaagtgacaagataaaaacttgacacacagtagagaaccgtgtaaacttaattgatgtaaagggaatgaacttaacaaaggggagagagcccatgacgcttgaaaaaacaacgagaatgaactacttgtttgacttctatcaatcgttgttaaccgcaaagcaaaagagctacatgtcgctttactacctagacgatttttccctcggtgaaattgcggatgaatatgaagtatcaagacaggctgtttatgataatattaaacggactgaagcgatgcttgaacaatatgaagaaaagctgctcttgtttaagaaatttaaagagcgtaaagaacttctcaaaaaaatgagagagctcgtagcagattccgctcagacggaagaagcagaagctttaattgaatcgcttgagaaattagattaggaggcggcacagtatggcatttgaaggattagccgaccgactgcagcagacgatttcaaaaatccgcggcaaaggaaaagtgtcagagcaagatgtaaaagaaatgatgcgcgaggtacgccttgcccttcttgaagctgacgtcaattttaaagtagtcaaagactttgtgaaaaaagtaagcgagcgggcagttggacaagaggtgatgaaaagccttacccctggacaacaggtcattaaagttgtaaaagaagaactcactgaattaatgggtggggaagagagtaaaatcgctgtagcgaaaaaatctccgacagtcattatgatggttggtcttcaaggggcaggtaaaacaaccacaactgggaagcttgccaatttacttcgcaaaaaacataatcgcaagccgatgatggtggctgcagatatttacagaccagcagcgatccagcagcttcaaacgctggggaaacagcttgatatgcctgtgttttcattaggtgatcaagtcagccctgtcgacattgccaaacaggcaatcgaaaaagcgaaagaagaacaccacgattatgtcattttagatacagcaggacgccttcatatcgatgaagaattgatggatgaacttcagaaagtaaaagaagtagcgagtccagaagaaattttccttgttgttgactctatgacaggtcaagatgctgtcaatgtagcaaaaagctttaatgaacagcttggtttaacaggtgtcgttctaacgaaactagacggggatacacgaggcggggcagcactttccattcgagctgtcaccaatacaccgattaaattcgccgcactaggagaaaagctggatgcgattgaaccattccacccggagcggatggcatcaagaattcttggcatgggagatgtgcttacacttattgaaaaagcacaggcaaacgttgaccaagataaagcgaaagagcttgaacaaaaaatgcggaccatgagctttacgctcgatgatttcctcgagcagcttgggcaagttcgtaatatgggtccacttgatgaattgatccaaatgatgccgggagccggtaaaatgaaagggctcaaaaacgtccaagtagacgaaaagcagctcaatcacatcgaagcgatcattaaatcaatgacgaccgaggaaaaagaacagccagaggtcatcaatgcaagccgaagaaaacggattgcaaaaggaagcggaacatctgtacaggaagtcaatcgccttttaaagcaatttgacgaaatgaaaaagatgatgaagcaaatgaccaacatgtccaaagggaagaaaaaaggctttaaattaccatttatgtaattggttatacatgataaaaccgttgttaagaaaaaacactttacaaacccttttatcattgttaatatactatcttgttgaaatattttcggaggtgctagtaaaatggcagtaaaaattcgtttaaaacgtatgggatcaaaaagatctcctttctatcgtattgtagtagcagattctcgttcaccacgtgacggtcgtttcatcgaaacagttggaacatacaatccagtgttatcaccagctgaggtgaaaatcaacgaagaattagctcttaaatggcttcaaaatggtgcgaaaccatctgatacagttcgtaaccttttctcaagccaaggaattcttgaaaaatttcataatgcgaaaaacagcaaataatgaatgagctgtccttggaagaattgattgtgtccatcgtcgagccacttgttgatttccctgaagatattcatgtatcttcattagaaaaagatgagcaagtgatttacacactgtctgtcaatgctgaagataccggaaaggtcatcggaaagcaggggcgtacagcaaaagcgatacgaacagtcatgtttgcagcaagtgcagagtcttctaagaaagttcaacttgagattgctgactaaaaagggagagggcttaggacctcccctttttttacacgtttaaatctatttttcgttatactgtagaggacaaatgccttcggatagggggacaaaaaggaagatgcagatcattcaacatgtcaccgtcatgcaagtattaactgaaagcagtaaggacaaactgttaacgacttttttggagaaaaaagaaagactagaacgtgagtgcaatcaactatattttcaactgaaaaaacatgaaaaagaaccacatcagcaagaagccatccctcaatttcaaaaagccatcgataaacggcaggagaagatccagcaaattgactttcaagtagagcagctgcatattttgccgcttgggagtgaaatgaaagagacagaagtggatgcgctggttgaagtgaaaataggtgataaatgggatgacaagatgcaagataatgtcatcgtcgtgaaagacggcaccattgtggaaatacgtcaggggtgattgagaacatggaacaagaatggttaaatgttggaaagattgttaatacacacggagttcgcggagaagtacgcgtcgtgtcaaagacagatttcccagaagagcgatacaaaaaaggaagcgtcctctatatttttaagcaaggtcaaggggagccgctgaaagtcactgtcgcatcacataggcagcacaaacagtttgatttgctcacatttgaagaaattagctcattaaatgaagcagagctattgaaagaatcaatcttaaaagtagaaaaagaacatctcggctctttagatgaaggagagttttatttccaccaaatcattggctgtgaagtatacgatgaagatgatcagcttgtcggtcaaatcaaagagattttaacaccaggggcaaatgatgtctgggttgtcggaagaaaaggtaaaaaagatgccttgattccttatatcccatctgtcgtcaaaaagatcgatatctcatccaaaaccatacacattgaagtgatggaaggactcattgacgaatgaaaatcgacttcttaacactttttcctgaaatgttcgaaggtgtgctccactcatcgatcttaaaaaaggcacaggagaaagaagctgtctcattcaatgttgtcaattttagagagtattcggatcataagcataaaacagtagatgactatccgtatggcggcggtgctggtatggtactgaaagcacagcccgtattcgatgcggtagaagatttgacgaacaaagcaagcaagaagccccgaattattcttgtctgtcctcaaggagaaagatatacgcaaaagaaggcagaggaacttgcaaaagaagaacaccttatgttcatttgcggccattatgaaggctacgatgagcgcatcagggagcatcttgtcacagatgaaatctcaatcggagatttcgttctcacaggcggagagctgccagcgatgatgattgcagacagtgtggtcaggcttttgcctcatgtgcttggaaaagaagcgtctcacattgaagattcatttagcacaggtttgctagagcatcctcactatacaagaccagccgattataaaggactaaaagtgccggatgtgctcctttctggaaatcatgccaaaatagaagagtggcggcgcaaagaatctttgaagcgaacttatacaagacggccagatttgatcgattcttgcaaaacgttaacagaagaagaaaaaagatggctttggcagcttcataatgactagattgtattgcacactgcatataggtatggtatgatactacttgtgacttggacggcttgccgattcaagtttgaaaacgatgttccgctgcaatgaagaaagaggacatgagcatctgttggaaggagttgaaaacgatgcaacatttgattgaagaaatcacaaaagaacaattacgcactgatcttcctgcgttccgtcctggtgacactttacgtgtacacgttaaagttgtcgagggtactcgtgagcgtatccagatctttgaaggtgttgtaattaagcgtcgtggtggtggaatcagcgaaactttcacagttcgtaagatttcttacggtgtaggcgttgagcgtacattccctgtacacacaccaaaaatcgctaacatcgaagttgtacgtcacggtaaggtacgtcgtgcgaaactttactacctacgtgaacttcgcggtaaagcggctcgtatcaaagaaatcagacgataatgatatcaaaagaaagagcttgttacctgtaacaggctctttttttgtacaatgtatagagataatcgatagaagagaaggtgcacatatgacgattcaatggtttccaggccatatggcaaaagcaagacgtgaagtcacagaaaaattaaagctcatcgacatcgtatttgaattaaccgatgctagaattccgatgtcctctagaaacccaatgatcgaagaaatccttcagaacaaacccaaaatcatgctattaaacaaagcagataaagcggatcctcgtgtgacaaaggagtggcaggcgcactttgagcagcaaggtgttcggtcacttgctattaactctgtcgatggacaagggttaaatcagatcatcacaacttcaaaagaaatcttaaaagaaaaattcgaccgcatgaaagcaaaaggtgtcaaaccgcgtgcaatccgggcgctgattatcggaattcccaacgtcgggaaatcgaccttaatcaatcgtttagcgaaaaagaacattgccaaaacaggagaccggcctggtattaccacctcacagcaatgggtgaaggtaggtaaagaacttgaactgcttgatacacctggaatcctctggcctaagtttgaagatgagcaagtaggactcaggctagcggtgactggagcgatcaaagattctatcatcaacttacaggatgtcgctgtgtatggacttcgctttctagaagagaactatccagagcgattaaaaaaacgctatgacctggcggagatccctgaagatacggttgagctgtttgatgcaataggtacaaagcgcggctgtctcatgagcggtggatttattaattacgacaaaaccaccgaaatcattattcgggatattcgaacagaaaaatttggtcccctcacttttgagaagcctgaaagctaaaagacacgcagctcatgcgggtctttattttttgcggaaaactgccgatataaagaaggaggctgacgaaaagctgatgtacacggtgaaacaaataaaagaactgatagaaaagcattcgcaagacgagtcatacattcgtgagcttgtaaaagatgatacgagaaaaagtgtccaaaaactgatagagaagtggcacaaagagagagaaaagcagcagcaacttcgtgcagcatggaatgaaatgctgcaatttgaaaacaaagctaaggcgcagggatacacatgtattgctggaatagatgaagcaggaagaggaccgctggcaggccccgttgtcgcagccgctgtcatattaaaggaagacacagtcctgctcggtttaaacgactcaaagcaattatctgagaaaaaaagattggcgtattatgacctgatccaaaaagaagcacttgatatcggaatcggcattgttgatgcggctacgattgatgaaatcaatatttacgaggcatcaagactggcgatggtgagagcggtggagcagttaactcatatacctgattatctactcatagatgccatgacgctcccgcttcctattcaccaagagaatatcatcaaaggagatgcaaaaagtgcgtccatcgcagctggtgcatgtattgcaaaagtgacaagggatcagatgatggaagaatacgggcgtaagtaccctgagtatcaatttgaaaaacataaagggtacggaacaaaagagcatctggctgccattcaaacacatggagctgccccaatccatcgattatcgtttgcgccagtgaaatccgttatatcataaatttttgacctaaggaggctgcctgtgatgacaagagttgaggacatacatacagcactgaatagccggttaagtgcggcagaatctgttacattaaacaccgaaggaaaggaaaatgtgcatcggctgattctcggtaaagtactgaaaatgcttggagatgatacagcccttgttcaaataggctcaacaaaaataaaagcacagctagcggctcagctcaaagcagacgcattttattggttccaatttgaacaagagggtggaggcagcctcaataaactaaggccagtacagcaatttgatcaagaccctaagacattaaaggatgcagctgccaaactattagaaggtctctcacttaaaaacggacttgaaaacatcctaacagccacagcttttttaaaagaaaaatccgttatcaacgaagcagagttaaaaacggcagtgaagtggatcgaacagcttcaaggagctgatgtgaaaaaaggtcttcaggcactcctatttgctttaaaaaaagacttgccgatccaggaaggagtgcttcaatcaattttagccgtgaaatcatcctctgctcttcatcaggatatgacagcgttgctagaacgattaacacagctcccgaagcactcagacgccacacaggcccttacacaagccattcgatcagtcatagatgctgagacgactgtccatgcagaaaagctcttatcggtccttctagcagcgagagaaggggcggcgaagcaaggaggcagtctacctgtaacgcctcagcccaatctgtctcagccaaaagaaaatagccaaactccaatcgctcaagagcgtcagacgacccaagttcttcaaactaacgtgcagcagtcaacaagtccaaaagagctgcaaatcccgcttcagcaaattgagcggataatggcaagtttgacgaagcaaggtgcagacgggcagcaagagcctagcttaaaacagctcacgtcattgctgcaagggcttcagcaggcaggatctcagcctgacgcaaaagcatccgtgcttcaaaaagaatttccgttcctgtcaaaaacagaggcgaaagcattggctcaggtggtgcagcagacggaacccgcattaagcaataaaaccgatgtgctcgatttactcatgacgatgaaaaaggcaataggtgtacgagatgaaatcggtatgctgaaactactcgaaaaaggcagccaggatgtaaaaagtcaggagcttcaccaattaaagctcgtcttaaatgatgtgaggcaggctgatttaccagagcccgtaaaaaaagaagtcgatcaattgtttcatagattgaacggccagttatttgtgcagcaggagaaccaaaccatcagccaaatgatggtctcttatccgctcttttcaaaacatagtgttcaagatttaacctttattctaaaaggacataagaaaaaagatggctctattgatatttctcagtgccgtctcatgttttacttaaacatggaaaacctcgaagagacattaatcgactgtacgattcagcaaaaggtcatgtcaattacagttgaaaccggtcatgaacttcaaggaaccattaatccgatgattccagctgttcgggagaatttaaatgccttaggatacagtctaacgggaattacagcaaagaagagacaagagccagtagatccgtctcactttctagatgaacactttcataaaatcagcgagaaagggctggacttacgagtatgaaggattcaaaaccgcttagaagggcggtcgctctacattatgatgaagaaaaacaaaaggcgccaaaagtcgtcgcaacagggagcggctatgtggcagaccatattattgaagaagcaaaaaagtcgggagttcctatccaagaagaccgtaatttagtcgaactcatgcgccatttaacacttgatgaggagatccctgaagcgttatacgatactgtagcagaaatattttcgtttatctataggttagatcaaaaaatgaaaaaataaggaaaaataagtgatttggctgaaaaatttatatttttaataaaataaaagtttgaatgtttagaaggattttacgattttacatagaaccctagacattctcttttttattctttaaaatgaaagcgcagtctattttataatttttgtttctacatatgttaggaggatgggaaatgaatatccatgagtaccaaggaaaagaaatcctaagaaaatatggggtttcagttccaaatggtaaagtagcatttacacctgatgaagcagtgaaagcatcagaagagctagaaagctctgtatatgtcgtaaaagcacagattcatgcaggcggccgtggtaaagcaggcggggtaaaaattgcaaaaacaaaagatgaagtgaaagggtttgcagaggaattgctcggtaaaacacttgtcacacatcaaactgggcctgaagggcgcgaaataaaacgcttacttattgaagaaggctgcgatattcaaaaggagtactacgttggacttgttttggacagagcgacatcaagaattgtattgatggcttctgaagaaggcggtactgaaattgaagaagtagcagaaaaaacgccagagaaaatcgtcaaagtggtcatcgacccagcgattggcttgcaaggctatcaggcaagagaagtagcgtttaaaattaatattccaacaaaattagttggccaagctgttaagtttatgacaagtctttacaatgcgtttattgaaaaagattgttcaattgctgagattaatccacttgttgtaacaggcgatggaaaagtcatggcacttgatgcgaaattaaactttgatagcaatgctttatatagacaaaaagatatattagaataccgtgaccttgatgaagaggatccaaaagaaattgaagcatctaaatatgatctaagctacatttctctagatggaaatattggctgtatggtcaatggtgcaggtcttgcgatgtctacaatggatatcatcaagcattacggcggggaccctgcaaacttcctggatgttgggggcggtgcaacagctgaaaaagtaacggaagcatttaaaatcatcttatctgatcaaaatgtaaaagggattttcgtgaacatttttggcggtatcatgaaatgtgatgtcattgcagaaggtgtcgttgaagcgacgaaacaagtcggcttaacattaccactcgttgtacgtcttgaaggaacaaacgttgaattagggaagaaaatcctgagtgattcaggcttaaatatcacttctgctgagtctatggctgacggggcagaaaagattgtatctttagtcaagtagagcagaaaggcagggaacctaaatgagtgtatttattaataaaaatacgagagtaattgttcaggggattaccggttcaaccgcattgttccatacaaaacaaatgattgagtacggaacaaatattgttggcggtgtcacacctggaaaaggtggaactgaagtagaaggagttcctgtatttaatacagtatctgaagctgttcaaacaactggagcaaatgcttctgttatctatgtaccagcaccatttgcagcagatgccattttagaggctgttgatgcagaagtcgatctagtcatttgtatcacagaacatattccagtgcttgacatggtcaaagtgaaacggtatatggaagggaaaaagacaagacttgttggccctaactgcccaggtgtcattacacctgaagaatgtaagattgggatcatgcctggctacattcataaaaaaggtcatgtgggtgttgtttctcgttctggaacgcttacatatgaagcggtacatcagctttcagaagctggcgttggtcaatcgacagctgtaggaatcggcggagaccctgtcaatgggacgaactttattgatgtattaaaagcattcaatgaagaccctgatacacatgctgtgattatgatcggtgaaatcggcggtacggctgaagaagaagcagctgaatgggtaaaagcaaatatgacaaagccagtcgttggctttattggcggtaaaacggcgcctccaggaaaacgcatgggacatgctggtgccattatttctggtggtaaaggaacagctgatgaaaaagtaaaaacaatgcgtgaatgtggaattgaagtggcagagacaccatctgtcatgggagaaactttaattaaagtgttaaaagagaaaaatctcttcgaagcttgtaaaacgcattaatgacacaagaagacttgttctttgacaagtcttcttctttctatcttaaactggaggaatggtatgtacaacgtgtccgaaagaatgatttttcaccgcttaaaaggcctcatctcaccctctttgttaacaaaatggtggaaagtcgatcctgagctatatataaatgaagaaacacaacatttcaaacaggatcgatcattacaaacgatcgactttacccgcttaaaacaagccgaagaaaatgaattccccatttttcaacacatcgttcaagcctatttaaagcaaaacattcacatgatacccatcacatcacccttatatcccagcacactaaaacatatttatgatcctccccctgtgttattcctaaaaggaaacatatcatatttaaatgaagaaaaaagtttaggtgtagtaggcacacgagttccatcgtcttatggagaagcatgtgtgaagaaaattgttggtgagcttgtaaaggaagattggacgattgtcagtggcttagcaaaaggaattgatggacttgcacataaagagtgcattcggaataaagggaaaaccatcggtattatagcaggcggatttcagcacttatacccaaaggaacatgtgcaaatggctcaatacatgggagagcatcatttgcttttatccgagcatccgccttatgtgaaaccagaaaagtggcatttcccaatgaggaatcgtttaattagtgcgctgacaagtggaaccatcgtgattcagtgcaaagaaaagagcggttcgctcattaccgcgtatcaagcacttgagcaaggtaaagaggtatttgcggttgcaggatctatctttgatcctaattccacaggaccagccagacttatacagcagggagcaaagcttgttcattcaacgaaggatattttagaggaattctccttccacagcgttcaatatactgaactctcataaaaatatcgtttgacaaaagacataggaatatttaataatagtgaggatttaagtttacactttgtttttcgtgtttataatgatgttcatcataaagaatttttaatgattgcctgttagataagtgcaattaacataaatatgaattgtgaaatgtataaagagagaacacctcttaagggggattttgagtatggctgattatttagtcatcgttgagtcgccagccaaggcgaaaacgattgagcgttatttaggtaaaaagtataaagtaaaggcttcaatggggcacataagagatttaccgaaaagtcagcttggtgttgacactgagcatgacttcgaaccgagatatattacgattcgcgggaaaggccccgttttaaaagaattaaaaacagctgcgaaaaaagcaaagaaagtctatctcgcagctgaccccgatagagagggagaagcgattgcttggcatttagcgcatagccttgaccttgacctctcttctgactgccgcgttgtctttaatgagattacaaaagatgccattaaagattcctttaagcatccacgtatgatcaacatggatttagttgatgcacagcaggcaagacggatcttagatcgtctcgtcgggtataaaatcagtccgattttatggaagaaagtgaaaaagggcttaagtgccggtcgtgttcaatcagttgcactccgccttattattgatcgcgagaatgaaattaatgaatttaaaccagaagaatactggacaattgacggtacattcctaaaaggaaaagaaagcttcgaagcgagcttctttggcgtcaatggcaaaaagcatccactgaaaacaaaagaagatgtaaaagaaatcctttcgaaactaaaagggagcaaattctctgtagagaaagtgacgaaaaaagagcgtaaacgcaacccagctgttccgtttacaacatctactttacagcaggaggctgcaagaaaattaaacttccgtgcgaaaaagacgatgatgattgcacagcaattatatgaaggaatagatcttggtaaagaaggtacagtcggactcattacatatatgagaacggactcaacacgtatttccaatacggcgattgaagaagtatctgctttcattgatcagacgtacggtaagaatttcttaaatacaacaaaacgaaccgctaaaaagaacgaaaatgcacaagatgctcatgaagccatcaggccgacttctacgctaagaaaaccagcagatgtcaaacatgtcttaagccgagatcagcttcgtctgtataaattgatttgggaacgattcgtggcaagccaaatggcgccggctgttcttgatacaatgagtgtagaccttgacaataacgggcttacattccgtgctaacgggagcaaagtgaaattccctggattcatgaaggtatatgtagaagggaaggacgaccagctagaagaaaaggacaaaatgctgcctgatcttaaagaaggtgatacggttctttcaaaagatatcgaacctgaacagcacttcacgcagccgcctccgcgctacactgaggcaagacttgtcaaaacacttgaagagctgggtataggccgtccgtctacgtacgcaccaacattagatacgattcaaaagcgcggctatgtcgcacttgataataaacggtttatcccaacagagcttggggaaattgttcttaacttaatcattgaattcttccctgaaatcattaacgtggaattcacagcgaaaatggaaaaagaacttgatagcgttgaagaaggtacgatcgaatgggttcgcattatcgacagcttctatcaagactttgcaaaacgggtagaaaaagcagaagcagagatgcaagaagttgagattgagcctgaatacgccggagttgactgtgaagagtgtggacatccgatggtgtacaaaatgggtcgatacggtaagttcatggcttgctctaactttcctgactgccgtaacacaaaaccaattgtcaaagacatcggtgtgaaatgcccgacatgtcatgaaggaaacattgttgaacgaaaatctaagaagcgccgcattttttatggctgtgatcgttttccagagtgtgaattcgtctcttgggacaaaccgattgaaagaaagtgtccaaaatgcgaaaatatgcttgtagagaaaaaactgaaaaaaggcattcaagttcaatgtgtgaactgtgattataaagaggaacaacaaaaatagcggtgaacagccttgttcacctgcttttttatgtcatcaaacagaacttacgaaataggagagttgtacaatgagtcaatttgtaaatgtgatcggagcaggtttagccggaagtgaagcggcatggcaaattgccaaacgcggaattaaagtcaacttgtatgaaatgagacctgtcaaacaaacgccagctcaccacacagataaatttgcagagcttgtatgcagtaattcactgcgtgccaacgctttgacgaatgcggtcggtgtattaaaggaagaaatgcgtcatttagattcagcgataatcgcagcagcagacgaaagctcagtccctgctggcggagcgcttgcagtagatcgtcatgaatttgcagcaaacgttaccgatcgcgtgaaaaatcatccgaatgtgacggtttttcaagaagaagtgcaaagcattcctgaaggtccgacaattattgcaacgggcccgcttacatctgaagcactttcaaaagaattaaaatctttaactggtgaagagtatctgtacttctacgatgcagcggcacctattctagagaaagatagcattgatatggataaggtgtacttgaaatcacgttatgacaaaggagaagccgcttatttaaactgtccaatgacagaagaggaatttgatcgtttttatgaggcgctcatttctgctgaaactgtgccattaaaagagttcgaaaaagaaatcttctttgaaggctgtatgccaattgaagtcatggcgaaaagaggaaagaaaacgatgctgtttggtccgatgaagccagtaggacttgaagatccgaaaacaggaaaaagaccttacgctgttgttcaattaagacaagatgatgcagcaggtactttatataacatcgtcggcttccagacacatctgaagtggggcgaccaaaaggaagtattccgcttgattccaggtcttgaagaagcagaaatcgttcgatacggcgtaatgcaccgcaatacatttattaactcaccaagtcttttaaaaccaacgtatcagtttaaaaatagagaggatctattctttgccggacaaatgacaggcgttgaaggctatgtcgagtccgcagcttccggactagtggctggaattaacgccgctcgttttgtcaaaggagaagagcttgtgacacttccggaggaaacggcgatcggcagcatggcttattacatcacatcgacaaacaagaaaagcttccagccgatgaatgcgaactttggcttgctgaaagatcttggtgttcggattaaaaacaaacaagagcgttatgcagagtacgctaagcgcgcaatcgaaactattcaaactatttcgaaatctctgtagtaaaacattgcacggaaagcaagatatgtgataccatttaaaagccttaaagaggtgtaaaaatgacgaataaacagcgtcttgtccacttattcattgaatatctgcaaattgaaaaaaactattctgctttaacaatctcaggatatacagaagcgattgaagagtttgtcagatttatgaacattcaaggaatagacggttttgaagaggtatcctatcaagatacgagaatttatttaacagaagcttatgaaaaaggcctgacaagaagaacgattagtaagaaagtctctgcgcttcgcagcttttataaatttctattaagagaacagcttgtgaaagaaaatccttttttactcgttagcttaccaaagcaggataagcgaattccttcatttttgtatgaagaggaacttaaagagctttttacagtttctgatgtcagcacaccgcttgggcaaagaaaccaagcgattttagaacttctttatgcaacaggtatgagggtcagtgagttatgttcattaaaagaatctgatcttgatttatcgttggatacagtgcttgttcatgggaaaggcagcaagcagcggtatgttcctttcggttcatatgctcatgaagcgctcatcacttatttagaggatggaaggcagaaactgaaagctaaggggaatgatcgtgctgatgcatatgtgtttttgaatcagcgcggggcgcctcttacagacagaggcgttcgattcattctcactgaattaatgaaaaaggcgtcaggcacactacatatccatcctcacatgttaaggcacacctttgccacacacctcttaaatgagggggcagatttgagaagtgttcaagaacttctcggtcattcgaatttatcatcaactcaggtgtacacgcatgtatcaaaagattctttaaggaaaacatacatgtctcatcacccaagggcttttaaacgatcctaaaaggaggttttttcatgtcatcatttcatgcaacaaccatctttgccgttcaacataaaggaaaaagtgcgatggctggagacggtcaagtcactttcgggcaggctgtcgtgatgaaacacacggcaaaaaaagtgcgccgtcttttcggaggcaaggtgcttgcaggttttgcaggttcagtagcagatgcatttacactctttgaaaagtttgaaacgaagcttgaagaatatggtggtaacttaaagcgggcagccgtagaactagcgaaagaatggcgaagtgacaagatgctcagacagcttgaggccatgctgatcgttatgaacaaagacagcatcctgcttgtctctgggacaggagaggtcatcgaaccagatgacggtattttggccatcggctcaggcggcaattatgcgcttagcgccgggagagcactcaaaacacatgcaggtgatcacctcacagcgagagatattgcaaaggctgctcttgaaaccgccggagaaatctgtgtctacacgaacgatcaaatcactttagaagagcttgaatagaaaggacatgagacgtatggagaaaaagccgttcaccccaagagagatagttgaaaagcttgatcaatatattattggtcagcttgatgcgaaaaaagcagtggcggtggctttaagaaaccgttacagaagaagccttttacatgataagctaaaggatgaagtcgttccgaaaaatattttaatgatcggcccaacaggtgtggggaaaacagagattgcccgcagaattgcaaaaatttctggtgcgccttttattaaagtggaagcgacgaagtttactgaagttggttatgtcggccgtgatgtagaatcgatggtcagagatctagttgagacagcgatcagaattgtcaaagaagaaaagatgaaagacgttcaagaagaagcagaaaaacaagcaaataaacgtcttgttcatttacttgttcctggcaagaaaaaaagccagtctgtgaaaaatccttttgagatgctgtttggcggttctgatgaagatgaccgtgatcgagatcaatcaagtgaagaagttgaacttgaatcgacaagaaagcgaatcgcacatcagctggctatgggagaacttgaagatcattacgtcacgatcgaagttgaagagcagcagccatccatgtttgatatgcttcagggctcgggtatggagcaaatgggcatgaacatgcaggatgcgctcggcaatctcatgcctaaaaagaaaaaacgcagaaagctgaccgtcagagaagcaagaaaggcgttaactgctgaggaagcttcaaaactaattgacatggatgaagtcagtcaggaagccgtttataaagcagaacagcaagggattatttttatcgacgaaatcgacaaaatcgccaaaagcggtggtgcatcatctgcagatgtttctcgtgaaggtgttcaacgtgatattttaccgattgtagaaggttcaactgtgatgacgaaatatggggcagtgaaaacagaccatgtgctttttgtagcagcaggtgcatttcatatggcgaaaccatcagatttgattccagagcttcaagggcgcttcccaatccgtgtagaattagataaattaagtatcgaagactttgtgaaaatcttaacggaaccagataatgcattattaaagcaatataaagctttacttgaaacagaaggtatatctcttgaattttctgacgatgctattcataagattgccgaagtggcttatcatgtcaatcaggagacagataacatcggtgcaagaaggcttcataccatacttgaaaagctgcttgaagagctttcatttgaggcgcctgatattacactggagacagtgaccattacccctcagtatgtagaagagaagctaggaaagattgcaaataacaaagacttaagtcaatttatactttaacaaatgaataaagtaatctaggaggatcattaatatggcgttactacaaaaaacaaggattattaactcaatgctgcaagatgcagcggggaaaccagttaattttaaggaaatggcagaaacgttgagagatgtcattgattcaaacattttcgtgttaagcagaagagggaagcttctaggctactcgatcaaccagcagattgaaaatccgcgtatgaagaaaatgcttgaagaccgtcagttccctgaagaatatacaaagagtctattcaacatccctgaaacatcttcaaaccttgacattaatagtgagtatacagctttcccgattgagaaccgtgatttattcgaatcaggtttgacaaccattgttccaattatcggaggaggagatcgtttaggcacgttaatcctgtctcgtttgcaagatacattcaaagatgatgatttaattcttgctgaatacggtgcaacagttgttggaatggagatccttcgtgagaaagcagaggaaatcgaagaagaagcaagaagtaaagccgttgtccaaatggcgattagttctctatcatatagtgagcttgaagccattgagcacatctttgaagaacttgatggcaacgaagggcttcttgtggcaagtaaaattgctgaccgtgtaggaatcactcgttcagtgatcgtgaacgccttacgtaagttagaaagtgcaggcgtcatcgaatctcgttctcttggaatgaagggaacgtatatcaaagtgttaaacaacaaatttttaatcgaacttgaaaatttaaaatctcattaatcaaaaccccttttcggccaaaattacaagctgaaaaggggtatttttttataaaaaagaggatttgtccgaaaaatgacactcttttttccaagaaaacccttacaattcttagttctttgaatctaggtctttatacctattcgtaaaatagatatatattacgagttttttttacatatacatcatagactttaatcctattatttcttacaatgaacatatggttttacaaatctcgacatgattaaatggaatgaaatacatatgattggaggtatatggttttggatatattttctggaacgataagcaaccttgagaatgccttgggcagagcgaatgttaagcaaaaagtcataagcaataatatcgcgaatatagacacaccgaactacaagtcgaaaaacgtcgcttttcatgatatgctaaacgatgcgtcgatcaagttagatgctaaaaaaacataccaaggtcacattgatttttctaaaacagggtctaattattcagttgtttcgagcaaccgtacttcatatcaagaaaacggaaataatgtcgatattgatcaagagatgagtgaactcgctaaaaaccaaattcagtataatgcgttggttgaaagaatgagtggaaaattcaattctcttaaaacagttttgacaggaggtaagtgatgtcaattttttcaggcgttaacgcttcggcctcagcattaacagctcagaggctcagaatggacgttgtatcctctaaccttgcaaatatggatacaacaagagcgaaacaggttgatggcaactgggagccttatagacgtaagctcgtcacattacagccgtcaggtgaatcgttttcatctatattgaactcaagcatgaattcgagcggcaaattaggaaacggcgtgaaagcaacgaagattacagaagacgaaactccattcaaccttcaatatgatcctacaaatcccgatgccaatgaaaatggatatgttcaaacacctaatgttgatccattaaaggaaatggttgacctcatcagcagctcaaggtcatatgaagcaaacgtgaccgcactaaatgcgaataaaagcatgttgatgaaagctttagaaataggaaagtaaggtgaaaagaattggttaacgcaatatctcctttccagcttcaaaccgctcagcaagcaagtgaattgacgaatgcatcgtccgttcaggcggctgcacctaaaagtcaaacgaatttctctgatgtgctgaagaattccattgaggcattaaatcaatcacagctgaaatcagaccagtatacaaatgctcttgcacaaggaaaagatgtcaatctcgatgaagtcatgattgcctcgcaaaaagcgagtgtgacactcacagctgcaacggagtttcgaaataaagcagtcgaagcgtaccaagagattatgagaatgcagatgtaggaggtgctgacggacaaaaaaagactgaatggaatgaccgggggttaagatgaatcgtactttaatgcaattaagaacaaaaacagttgagttttggcgaaatcgatcaaaattacaaaaaatactcatgattggcggcgttgctgccctagcaatcattattacggttgttagcatctttgcttcttctgaaaaaatggttccattgtttagagatttgtctgaggcagaagctgggcaaatcaaacaggaactggatggcaaaaacgttaaatcggaacttgcgaataatggaacaacgattctcgttccagaaaagcaggccgacactttaaaagtaacactcgcatctgagggtctccctaagacagggaatattgattattccttctttgcgaacaattccggcttcggtttaacagataatgaatttgatgttctgaaagtagacgcaactcagacagaactatccaatctgatcaacacgattgatgggattaaagattcaaaagttatgattaacctgccaaaagattccgtttttgttggagaagagcaaagtaatgcatcagcatccattgtgctgcaagttgagtctggctacacgctcgcgccgcagcaagtaaaaggcctttatcatcttatttcaaaaagtgtgccgaatttaaagacagaaaacattgtcattatggaccaagattccaactactacgacttaaacagcagttccgattcttatgcaagtggaatggatgcacagcagcagaaaaaagaagagattgaaaagaaccttcaaagaaaaattcaacagctgctcggaacaatgatgggtcaagaaaaagtggctgtatcggtcacaacagacattgattttactgaagagaaaagaaaagaagatcttgtagaaccagttgataaagaaaacatgcaaggcattgctgtcagtgctgaaaagattgctgaaacttattcaggaaatggtgcagcagctggaggcaccgctggaacaggcgacgatgatgtcacaaattatcaaggcgccgatggagcgaacggtagcggagattacgaaaagagcgaagatcgtatcaactatgaagtcaaccgcattcataaagatatcaaagagagcccttataaaattagagatgttggcattcaagcattggtcgaaccaccaactgcaaacgatgtgaactctttaacacctgaaaggcaagatgatatcaaaaagattctttcaacgatcattagcacttcaattgataaagaatacacaaatggtcaagcgctcactcaagcggacttagataacaaaattgttttatctgtatcaaaattagacggtaaacagcaaactgcagcagaaaacccatcaaacaatattccaatctgggtttatattgtaggcggtgtgctactacttgcaattatcgctctcattattcttcttgtgcgtaaacgcagaaaagaagaggaagaagagtttgagtttgatgaacgtacaccaatccatgttcctgatatcgacactgaaccagaaacagaagaaatggtgagaaaaaatcagcttgaaaaaatggcaaaagaaaaaccagaagactttgctaaattgctacgcagctggctgtccgaggattaggaggaatacacatgtcgagaaaagatccaaatcgactaacaggcagacaaaaagcagcaatcctaatgatttccttagggctagacgtgtcagcatctgtatacaaacatctgtctgaagacgaaatagaaaaattaacattagaaatttccaatgtacgaagtgtagatactgctaagaaagatgaaatcatcgaagagtttcacagcatcgccatcgcgcaggactacatatcacaaggcggtcttatgtacgcaagacaagtgcttgaaaaagcgcttggtgaggacaaagcggacagcatcttaaaccgattaacatcctcgcttcaagtgaaaccgtttgattttgctcgaaaggctgacccagaacaaatcttaaactttatccagcatgagcatccacaaaccatcgcgctcatcctttcctacttagatccagtccaagctgggcagattttatctgaattaggagaggaagtacaaacagaggttgcgagacgtattgctttaatggaccgcacatctccagagatcatcaatgaagtggaacgcattcttgaacaaaagctttcttcaacctttacgcaggactatacgcaaacgggcggggtcgaagcggttgtagaagtactaaatggtgtagaccgtgcgaccgagaagaccattttagacacacttgaaattcaagatcctgagcttgctgatgaaattaagaaacgtatgtttgtctttgaagatattgtcactcttgacagtagagcgattcagcgcgtgatcagagatgttgaaaatgacgacttattgctcgcgctcaaagtggcaagcgaagaggtcaaagaaattgtcttccgcaacatgtcacagcgaatggtcgaaacgttcaaagaagaaatggagtttatgggacctgtccggcttagagatgtcgaggaagcacaaactcgtattgtcagcatcgtaagacgactcgaggaagctggagaaatcgtcatagctcgaggcggaggagacgatatcattgtctaggattatcaaacatgaaacatctgttattcttgagcaaggccggcaaacgattcctttgcagcaagtggagtttaaaaaagaacatcacgaagaagagcttgtcaatgaaacagaagcatcgcagcttgtactaagtgatgctgaagatcaagcaagccgtatagtagaacaagcaaatagtgagcttgaaaaaacaatggctgaaatcaatcagcgccgcgctgcttttgaagaagaaagaatgcagctcattgaagaagcgaaacaagcaggttaccaagatggcttccaaaagggtgaaacagatgcgaatatgcagtaccaatcgattcttgatcaagcgaatgacattgtcagtcttgccaagcaggattacgaagaaaaaattgaaagctccgcagaaaaaattgtggaactggctttcgaactcgccaaacgcgtttggtactcggctgaggacacgaaagatcaatttttggctctcgtgaagcaggtcatttcagaagtgaaagaatatgacgatatttccatctatgttgaccctgaacattacgatcatgtgatggagtataaagacgaattaatcagaatccttcaaaaggatacacaccttgccatttactcggatgaaaaagcgccaaaagggacttgttacgtagaaacaagctttggaaaagtggaagcgagtgttgatacccaaatgaatcagttgaaagaaaagttactagaagtcattgattcaggtgatcacaaatgaacattgatgtgttaaaagaaacaattgaaaccgccgatccttataaacgatttggcaaagtcaatcgagttgttgggctgatgattgaatctaaggggccggagagttctatcggagacgtgtgtctcattcataaaaaagggcgtaggcacgatccgataaaagcagaggtcgtagggtttagagatgaaaacattctgctcatgccttatgtagaagcatccaatatttcaccaggaagtctagttgaagcgacaggtgagtcgctgaaggtcaaagttgggactggattaatcggcgaagtcgttgatgccttcggtgatccgctggacggcagtatgcttccaaagggacttgcgcctgtttcgacagaacagtctcccccaaatccgatggacaggccgccgattcgagaaaagatgggcgttggtgtcagagtgatcgatagtctgctcacagttggcactggtcaaaggatcgggatttttgctggaagtggtgttggaaaaagtaccttaatggggatgattgcaaagcagacagaagcagatctgaatgtcattgcccttgtaggagagcgtggccgtgaagttcgtgagtttattgaaaaggatttaggtgccgaaggactgaagcgatcaattgttgttgtcgcaacttctgaccagcctgcactgacgagaatgaaagctgcttatacagcaacagctattgcggaatattttagagacagagggaaaaatgtcatgttcatgatggactctgttacacgggtcgctatggcacaaagggaaatcggtcttgcaactggcgaaccgccaacgacaaaaggatatacgccttcggtgttcgctatactgcctaaattacttgaacgaactggaacgaatcagcttggttccatcacagcgttttacacagtgcttgttgatggtgacgatatgaatgagccaatcgctgatacagtcagggggatcttagatggccacattgtacttgatcgtgctttagccaacaaaggacaatttcccgctgtcaatattctgaaaagtatcagccgcgttatgagcaatatcgcaagtcatgatcacaaggaggcggccaaccggttccgccagcttttatccacttatcaaaacgctgaagacctcattaacattggagcttataaaaaaggctcctcgaaagacattgatgaggccatgcaggcttatcctcatctgatttcatttttgaagcaggatgtagaagaggctgtatctattgaagacagtgtgaatttattgctccgtttgatgaatagagaggattgacaaaaacagtgagatatcaatacaaatttcaaaagctcttagaactgaaagaaagtgaaaaagacaagtcactcgcagcgtaccaacaatccgtttcagcatttgagcaagtcgctgaaaaactctatgaaaatatgagtaaaaaagaattaatggaaaaaagcaaagaagaaaagctgagaagtggtatgagtgttcaagaaatgcgtcattaccagcaatttgtgaccaatttagataacaccattcagcactatcagcagcttgtgatcatgaaacgccatcaaatgaatgaaaaacaatctgatttaactgaaaaaaacattgagtttaaaaagtttgaaaaaatgaaagaaaagcagtatgaaaagttttcccttgaacataaggccattgaaatgaaagaaatggatgatatctctatcagccaattcatgtttcaaggacattaggagtcgagataatgcctaagaaggaaaaaacgaaggaatcaagcggcggtaaatttcaatggatcttgtttattgtcattatcccattgattgtgcttgtgattgtgactggcacaatcctttatattgcgggttttgatctaaagaaaccgctccaaaacattccggtgatcagcagtttggttggttcagatgacacctcaaaaacgtcatcttcacataatgatcaaagcgatgcagaattgaaggaactgaaaaagaccattaaagagcaaaaaaatgaacttgaaattgcgcaaaaagatttaaaaacaagtgatgaagagattaaaagactgaatcaaaaaatcagttcgcttgaaaaaacatctaaaaatgatgcgaataatacgtcagcgagtgatagttcaacaaacaacagctcatcaagagatacatcaggtaataatgcgtcagggacaacttctgatggggcaggagcctctaaccagaaacctaaagggaagattgtcagtatctatgaaagcatggacgcagggaaatccgccaaaattttatcagaattaagtgataaagaggcattgaagatcctcgaagagctgagcaaaaataaactaacagacatattagcaaaactaacacctcagaaggcagctacgtttacgaaagagctttctaaaaaagaaagtgaaaatgggggtggacaataagtgaagctattggatattggagccttacagcaatcgtctcaaggtctctcgggaccaaaggggagcggcgtggcctctgcaagcgggttgtttaaacaattacttagcggggcaggcgctcaaagcgaccttgtgaatactgagacagcgggtgccactctttccatcaatgatgcgatgcaaatcattgaaaaatggatgcaatcacctgaagaaggcatcaacggagaccttcttagcgcgcttcaaacacttcaaggtcaaacgcttgattcgtctgatctcaagtcactagaagagctatttaaaaaaatggaatcatccatttacggtgatcaagctgataagccagcttctgaacatagtgagcagctcatacaagtccactttttcttatatcaactgctcaatcaacagccgctcagctttgatgcaaagttagtgcaggatattgaagcaaagggtcaagacttcattcactttctttcaaaaaatggggtagatgagaaactgattcagcaagtaaaagagcagtttttctcgcagggttcagcaccaaagctgaattcgatgtctcaaagtgagctgaaacactttaatcagttaatcgaccatatgatggcaaacgcaaaaggatcagacaaagagttgaaaattgctttaggagagttaaaagaattggtctctccaagacaagaatctactcttgcttctccggcaaaaggtgcttcctcccttgaatggctcatcaaaaaggaagttgtcaaaggacaaatcactgctgcacctgcttctgaaaaaaacatcactcatacgcttttgccaggtcataagcagttttttcaactgcaatcagcagctcctgttcaacagacacaaacaactgatgaaaagccaggaacggttgatcaacaaatactaaatacgtggaagcaaatgaaattcacgccatttggaaactcaagcggacgcttcacagttcgattaaatccagaaaatctcggatttatcacgattcagctgacgaagcaaaacggcatgtatgcgagtaaaattacagcttcaacgcaagcagcgaaagagctgttagagcaccatctgccgcagctcaaacaggcgcttccgaatatgtcggttcaagtggaccgtttccatataccgcttcaatcaaatgagcagtcgttatttggacagtttaatgaagaaaacaagcagcagcagtcaaaagggcagaatttccagaagcctgatgaacaggaagcagaattccaagatgtactggatgctcttgttgggtcagatgaagaagaggaggaaatctaatggcaacagttgatgctacaaatagaacagtcgcacaaacagacacttcttcaaaggcagaaaagaaaacagatacgctcggtaaagatcaattcttgaaaatattgcttacacagcttcaaaaccaagatccgacaaacccactagatgaccgtgagtttgtcacacagcttgcaacattttcatctttagaacaacaaaccaatatgaatgattctattaccaagctgaatcagctcatgtctacatttgttgctcaccaagatccgtttacgacgtatgtaggctggattggtaaagaagtatccggtaaacaagatgataaagagatatcaggcactgtgaagtctgttaaaaacataaacaatgaatacttcttgtatttagaagatggaacgaaaatcagcccttgggatgttacagcagttggagaaaaaacgaagtaattcgaggaggaaaataaatgttacgctcactttactcaggaattagcggaatgaaaaacttccaatcaaaattagatgttgtagccaacaacgtagccaacgtcaatacacacggatacaaaaaaagccgtatcacttttaaagatatggtcagccaaaccattggaagttctggtggaccaacgaacaactctggttcaatcaactcaaaacaaattggtttaggatcatctttatcttctattgataaaatcatgtcagcgggatcttctcaaaatacaaatgaaccttacgacttctatatcaatggagatgggtttttccggattgaaagtcaaggagaaattctttatacaagaacagggaatttcgacactgattcagagggaagcttagtcacccctgatggaaattatctgcttggaatgaatggacaaaagataacgattccagacggcgtttcgagtgtgagtgttggtccagatggaacggtttcggttgttgaaaacaatgtatcaagaaccgttggtcaagtatcactcgtatctttccgtaacgcaggagggttagacaaagttggtgacaacctttaccgccagaccttaagctcaggtgctccaagtaaccctatcgtacctggtgaacaaggaacgggcgtcatccaaacaggtaaacttgaaatgtcaaacgttgatttaacagacgagtttactgaaatgattatcgcacagcgtggtttccaatcgaatgcaaagacgatcacaacatctgatgaaatcctgcaagagcttgtgaatctgaaacgataggaggtagggggagcggtttatcgcttctctgcttaatatgattgaagtgacaagattaaatggcaaaggatttatgctgaacgctctccatatcgagcaaatcgaaagctttccagacacgaccattacattagccaatggaaagaaattcgttgtgaaagaagataaagagcagcttcaagagaaaatcatttctttctacagaaaaatccaagtcatttcattgaatcaaggaatagaggagtttgaatgaagaagaaattagtcgtagtaatgctaatcatgattattgccatcgtcggaattggagcaggcatcttttttctgctgaatgggtcagacgaagcaaaagcagaaaaagagccaacagcagatgaagtcgtaaaagcttctgttgaaattcctgagattattactaatttaaagtctgaaggaaatgctgtcaaacttgtattgaatattgaaacggattctgaaaaagcaaaagaagagctcgagaaaagaagttttcaagtgaaagacgccgtaatcgacattttatcagacacgaatgcagatgaacttgatggcaaaaaaggcagagaacattttaaaacactagtcaaaaacaaagtgaataactatttgcaagatggcaaggtgaaagaagtatatataacctcctttaatctgcaatagaggcgattaattgacacgatggaggtgaagaaatgtcaggagaagtgctttcccagaatgagatcgatgcattattatccgccatatctacaggcgaaatggatgcagaagagctgaaaaaagaagaaacgacgaaaaaagtgaaggtgtatgattttaaacgtgcactgcgcttttcgaaagaccagattcgaagtttaacaaggattcatgataacttcgctagactgctcaccacgcacttttcagctcagctaagatcatatattcaaattactgtcagctcggttgaccaagtaccatacgaagaatttattcgttcgattcctaatatgacattattaaacttattttacgtcagcccgcttgaaggaagaatcatgcttgaagtgaacccaacaatcggctatgccatgatggacaggctgatgggcgggattggcattagtcataataagacagaatcacttacagaaatcgaaacaaagattatctcaaacatgtttgagggagctttggaaaattacagagaagcgtggcagtccataaccgacatcgagcctgaaatggcagatttcgaggtaaatccccagtttgttcaaatggtgtcaccaaacgaaacagttgtcgtcatttctcttaatacacaaattggtgaggtcagcggtgttattaacctatgtattcctcatgttgtattggagcctattattccgaagctgtctgtacactactggatgcagtctgaacgaaatgaaccaaaacaacaagaaacaaaggccattgaaaaacggattatgacggcaaaaataccggtagtcgcagagctaggggaatcggaaatgacggtggaagagtttttgaatttggaaattggtgattgtattgccttggacaaaccagtaaatgcgcctcttactgttatggtcggaaataaaccgaaattcttgggacaggccggccgcgtgaatcggaaacaggcgattcaaattctagatcacgacataagaggtgaagaagatggagaataacggaagtaaattatcacaagacgaaatcgatgcgctccttaaaggaggcagcaatgacgatatagagcctgatacaatcctttctgcaatggagcaagatgccattggagaaatcggaaacatttcattcggtagctctgcaacagcactttcaaccctattaaatcaaaaagtggagattactactccaactgttacagtgattcaaaaaagtatgctgaatgaggaatttcctcatccgtatgtcgctattgaagtgaattatacagaaggcttcagcgcaagtaacttgcttgtcgtccagcaaacagatgcagcagtcattgcggacttaatgatgggcggagacgggacaaatgctgacccttctttaagcgagattcacttaagtgcagtgcaagaagcgatgaaccaaatgatggggtctgctgcgacatccatgtcgacggtctttaataaaaagattgatatttctccgccgcgcgtcgaattacttgatgtgaaagaaggagaagggacagaccgcattccagctgaagaaatgcttgtcaaagtatccttcagattaaaaataggtgaactcatcgattcaaatattatgcagctttatcctattacatttgcaaaagatctaatcgcagaattaacagacccagcgcaggaagaagagccggttcaagacacgcaagtgagcacacctgaacctcagccagcagcacctcaaacgcagtctgcaccagcgcagcaaactgctccgccgaaaagacaggcaaagccaaagccggcagcacctgtaaatgtggcaccagttgaatttgaagcattcagtgagcctcagcatacaacaagccagcttggaaatcttgatatgctgatggatattccgctttccattacggtggaacttggcagaactcagcgaagtgtaaaagaagtccttgagctttcagcaggaagtatcattgaactggacaaacttgctggtgagccagtagacattctggtgaacaaacgaatcgtcgccaaaggggaagtcgttgtcattgatgagaactttggtgttcgtgtgactgatattttaagtcagtcagaaagactttctaatttaaaataaacaaacatatagggagagaataagtaaatggctactaaggtattaatcgtagatgatgcagcattcatgagaatgatgataaaggatattcttgtaaaaaacggatttgatgtcgtaggagaagcagaaaacggcgctcaagcagttgaaaaatacaaagaaacgtctccagatcttgtcacaatggatatcacaatgccagaaatggacgggatcacagcactaaaagaaattaaacaaattgacgcttctgcaaaaatcatcatgtgttctgcaatggggcagcagtcaatggttattgacgcgatccaagcaggtgcaaaagactttatcgtgaagccgttccaggcagaccgcgtacttgaagcaattaataaaacgttaggctaaaaaagggtgtaagacttgttgaaaaaacgtttgatatgtatagcaatgatcagttttatgcttttcttgacgatgcagcctgcctcactgcttgctgaaacgaaagatcctgaaaatggcacagtgaatgaatggatcaaagaagagaaaagcagcaaaaaggatacagaaaagacaaccactgacaatcaaacgaatccggcagaagaagttccctcttcttctgtctccattatggattttgtcaaaatgattggtgccttactttttgtcatcctgctcatatatggattggtgagatttgttggtaagcaaaaccgcttactcaaaccatttcgctatgttgaaaatattggcggaacgacggttggccaaaaccgttcagtccagcttatcaaagtgggcaaacgagtattagttgtcggtgtagcggactcaatccagctgctaaaagaaattgatgatgaacaagaatgtgaagcgatcgtgaaacaatatgaagaagcgatggaaagcaaaacagatttaccaaaaatcgttcaaaaattcacatcgcaggtaaagaaacaaaatcagccaaccacttcttctttttcagccaatttgaaggcgcagctagccgaattgaaaaagacccaatcagaagtcagaaagaaaggcccgaaacaaaatgaatgagtttatcgatttatttaattccagcggtgcagggaatattagcacgtctgtccgtcttcttttacttttaaccgtattttcggttgcaccaggcattctcattttaatgacgtgttttacacggattgtgattgtactttcattcgttagaacgtcacttgcaaccaactcaatgccgccaaaccaagtgcttgtagggcttgctttgtttctcacattttttatcatggcacccacgttctcagagattaataaagaggcactgacgccgcttttaaatgatgatattacgctaaatcaggcatatgaaaaagccgaagtgccaattaaagagtttatgagtaaacatacgagacagaaggatttggctttatttcttagttacgcaaaaatggatacacctgaatcgataaaagatattccgttaacggcgatggtacccgcttttgcgatttcagaattaaagacggcatttcaaattggtttcatgatctttattccatttttaattattgacatggtggtcgcaagtgtcctgatgtcaatggggatgatgatgcttcctccggttatgatatcgctccctttcaaaatattgttatttgttttagtcgatggatggtatttgattgttaaatctttgctgcaaagcttttagagtaggtgcttaaaacatgagttcagaatttgtcattacgatggctgaaagatcagtgtatgtggtattacttgtcagtgggccgcttctagcgctcgctcttattgtgggactgattgtcagtgtgtttcaggcgacaacccaaattcaagaacagacgcttgcgttcattcctaaaattgttgcagttctgattgggcttgttgtgtttggtccatggatgctgtcaaccattgtgtcctttacgacagagctgttctcgaatttagatcgatttgcaggttaaccagcgatgtcaatcatagaattattccctgcttttctgttagtttttattcggatcaccgctttttttgtgacagtaccgcttttagcgcatagaacgatcccagctgtacacagagttggcttctcactgtttttagccgtgattagttttagcacgattaaggaaccgccagcactcgacatagacggtctttatatgatgcttgcggtgaaagaagcaatggtcggacttctgcttgggctgattgcatatatcatggtgtccgctgttcaaattgccggctcattcattgattttcaaatgggctttgcgatcgccaatgtgattgatccacaaacaggggcacaaacgccgctgatggggcagtttttttatacggtcacattgctattgatgctggcaaccaatgcacaccacctgctgcttgatggaatctattatagctttcaatatattgcagttgatcagtacgcactgaatttcggcagtgaatcctttgcttactttattgcaaagagcttcaaccaaatgttcatcattgcctttcaaatctcagcaccggttgtcgccagcttgtttttggtcgatttggcactgggcattgtggcacgaacagttccgcagatgaacgtttttgtggtcggacttcctattaaaatgggtgtgagttttattatgatcatcatctgtatgggcgtcatcttcggtgttgtccaaaatacatttgatacgattgtactcaccatgaggaatttcttagcattggtcggtggttcgtcatgatgacaaggcttagactagacttgcaatttttcgcaggtgaaaaaacagaaaaagcaacgccgaaaaagagacaagattcacgtaaaaaaggtcaggttgccaaaagtaccgacgtcaatacagccatctcatttctattaatctttttatcattcttttttattgggccttttatgaaagagcgtattattgcgcttattgaacgtttttattcaacaaccatgctaatgaaggttagcacatctaatattcatcaactatttgtggaattgcttcaggaaacagcgctccttctcatgccaattcttggtgttggtatgctggcaggcgtcatcagtaactatttacaagttggctttctcttttcaacagaagtcatcaaaccgaaattagaaaagctagatcctatcaaaggatttaaacggatatacagtattcgagccctcgtagagctattaaaatccattttgaaaattggttttgttggttttgcgacatttattgcactttggatgcactttgatgaaattctgcggcttcctttattaacagcagaggaaacccttcatttcgtcgcaaatatgaccttgattatgggtctatatgcagcaggtgctctcatgatcttagcagggcttgattatatgtaccagaaatttgattatgaaaaaaacttgcggatgtccaaacaagacatcaaagatgagtataaaaaatctgagggtgacccgctcataaaatcaaagattaaacagcgccagcgggaaatggccatgagacggatgatgcaggaagtcccaaaagcggacgtcatcattacaaacccaacccactatgcaattgctttaaaatatgacgaagaaaagatggacgcgccctttgttgtggcaaagggaacagatattttggctttgaaaattagaacgattgcgaaagagcacgatatcatgaccgtagaaaaccggccgctcgctcgtgcactatatgatcaggtcgacatcgaccaagcggtgccagaggaatactttaaggcgatcgcagaaattttagcttacgtatataaaacgaaacaaaagattttatgaatttttggttttaaaaggagagaacaggcatggcagcaagagatttatctgttttattcagtgttattttaattgtggcgatgctggtcataccatttccgccaatgctattaagtattttaatcattattaatatttctcttgcgcttatcgtgcttctcaccacaatgaacatgcaagaaccactgcaattttcaatatttccatcattgcttttgctcttaacgctgttccgcttagggcttaacatctctacaacacgatctatcctatcaactggagacgctggaaaggttgtagaaacgtttggttcatttgttgttggaggtaatgtactcgtgggtctggtggtcttccttattctgatcatcattcaatttgttgtaatcaccaaaggggctgagcgtgtttcagaggttgcggcaagatttaccctcgatgcaatgccagggaaacaaatgagtattgatgcagatttaaatgcagggatgctgacagaaagtgaagcaagaaatcgccgtgaaaaagtagcgagagaagcagacttttatggtgcaatggatggtgcaagtaagttcgtcaaaggggatgccatcgcaggtattatcatcgtcattattaatattatttttggcattattattgggatgcttcagcaaggaatgtcgattcaagaatcagcttcccactttacactattaacggtaggagacgggattgtttcacaaattcctgcacttctcatttcaacagcgacagggattgtcgtcacaagggctgcttctaatgggaaccttggttcagatatcactgaacagctgtttgcattcccggctatgctttacgtcacatcaggtacgatcttccttcttgggttgtttactccaatcggcgtacttttgacaggaccgatcgcaggtttacttgccctcggcgcatacttgatgtcgaaaaacaaacaggatcaagaagaaatcgaagaggtactagaggaacaggcagaggtagaagagatgaaaagtccagaaagcgtcattcaccttctgcaaatggatgccattgaatttgaatttggctacggcctgattccgctagccgatgcaaatcaaggcggtgacctgttagaccgaattgtgatgatccgaaggcagcttgccctcgaactaggtcttgtgattccagttgtccgaattcgagacaacattgcacttaacccaaatgagtatcggctcaaaataaaagggaacgaagtggcaaaaggtgagctgctgcttgatcactacttagcgatgtctcctacgcctgatgatgatccgattgaagggattgaaacaatcgagccatcctttggtcttccggctaaatggatctcagaagcagaaaaagatcaggctgagatgcttggctatacggttgtagatcctgcatctgttgtgtctactcacatcacagagaagattagacaaaacacacacgaactgctcggacgccaagaaacgaagcaattaatcgatcatctgaaagaaagttatcctgtcttagtggatgaggtgacgccaaatccactagcagttggtgatattcaaaaagtattggcaaaactgctgaaagaaaaggtttctattcgaaatcttgtcaccatttttgagacgcttgcagactacggaaaattaacgacggatacagatttgttaacagagtatgtcagacaggcgctggcaagacagattaccgcacaatatgcaagagaaaatgaatcgctcaaagtcgtgacatgctcaggtcgagtcgaaaaggtaattgctgacagcgtacagcaaacagagcatggcaactacttatcattagatccagaatcctctgaaagtgtgattcaatcagtggcgagagaaattgaacagctttcgcttcgtcaggaaacgccggttctattgtgctcacctcctataagaatgtacgtcaagcagctgttagaaagatatttcccggatttaccggtactatcttataacgaactagaagcaaatgtggaagtacagagcatcggagtggtggatatctaatgaaaatgaaaaaaatcacagcgaattcaatgcaggaggcaacgattcaaattaggcagcagcttgggaaggatgccgtcattttaaattccaaaaccgttgttaaacgaaagctattcggtttaaagaaacagcaaatggttgaagtaatagctgtgctggatcaagattttgaagaaagagcgggtaaaggtgtacatcctgcgcctcctcttccagtaattccgaaaaaggagcaggttcaacactggcctgcagagccatcccttgctcctgaggcagtgaaaccagtaccttctcatgctcagcctttagaatatgcgaggaatgagcggcatgctggtattctgcccgatcctctcatggcaatcgatcaaaagcttaaggatcaaggtcttgatgattcaattcgagacgaatgcctaaaaggtcttttaacgaagggtgctgtcaaggaagatcaaattcaaaaagaacttgaacaactgctgacaggtatgctgccggctcatacctctgatgagccgatgattcgttcaaaatacattgtgctgtttggttcaactggggctggtaaaacaacaacaattgcaaagctggctgccaaaactgccattcagaagcaaaagaaaatcgcttttattacaacagatacgtaccgaattgcagcgatcgaacaactgaaaacatacgcggaactgctcaatgcaccgcttgaggtttgttattcgagagaggattttgtgaaagctcaagagacctttaaagagtatgatcatattttcgtagacacagccggtcgtaactttaaagaagaagcgtatatcaaagagctgacagacattattccatttgatgaaagctttcaaagtttcctagtgatgagtgcgacctcgaagtatcaggacatgagagccatggttaaacgatttgaacacgttccaatcgaccaattcatttttacaaaggtagatgaaacagacacgatgggaacaatctttcaaatcattacagactctcaaatcggacttggatttttaacaaatggtcaaaatgtacctgaggatattcttgagggctctcctcttgaattaacaaggatggtcttacaatgatgaagcccgaccaagcagaaggtttaagaaagctcgttcagcagaatcaaacgattacaccagctcctcttggtataagcaaacaggcaaaaaccattgctgtcatgagcggtaaaggcggagtaggaaaatcaaatttgacgctgaatatggcactgtctatcgcaaatgcaggcaagcgagtgttagtcatcgaccttgattttggtatggggaatattgatattttactaggaaaaacatcgactagctctatattagatgttcttgtcaggaagaaatccttccaagcagctatgacacaaggaacgaacaacctttattacatttctggcggaagcggacttgaacagctgttttctttagataaagatcaatggtcgttctttctagaggaaatggaaagaatgatctacgactttgattgtatcttctttgatatgggtgccggcttgtcaaaagatcaactgccttttgttttatcagcaggagaagttgtggttgtgacaacgccagaaccaacatcgatcatggatgcttacagcgcaattaaacacttagctattcatcagtttgaacaatctgtgcaaatcattgtcaaccggtgtaaaacctcgtcagaagggtctgaaacctaccggaaattagcaggagtggtcacatcatttctacacagaaaactagtatttgctggtgctgtgccagatgatcctgcggttcctaaagcagtggctgaacaaattccattttatatcaagcagcctcactcaaggctgagtaaaacgatcaagatgctggcagaaacactttatcaacagcagataagagaggcacagagagagcagcatacgtttatagataagttgtcctctttttttaaaaggaggaaggtggactcatgattagagtgcttgtagtagatgactcggcctttatgcgaaagctcattagtgatttccttagtgccgagcaagaaatagaagtcgtcggaacggcgcgaaatggggaagatgccttaaaacggatcaaggaactgaatccagatgttgtcacactagatgtagaaatgcctgttttaaatggaacagaagcattaaaacaaattctggctgaacacgaccttgccgtgattatggtgtcaagccagacaaagcaagggaaagatttaaccatccattgcttagaacttggtgcgtttgactttgtgacaaaaccttcaggaagtatttccctcgatttgcacaaagtaagaggccaaattgtagagcgggtgcttgcggcagggatgtcaaggaaacgcacagaagtgcagatttctcctaagccggtgatgaagacgccaagtccagtggcttttcctcgcccgcaagcagtaaaaagcagctcactccgaaagattatttcaatcggaacatcgacgggagggccaagagcacttcaacgagtcgtcacgaagctgccaaaggacatagaagcacccattttgattgtgcagcatatgccggcaggatttacggcatcacttgctactaggttagaccatttatctcaaatttcgattaaagaagcacaagatggagatatcgctaaaaatggagtggcttacatagctcctggtggaatgaatatgtcacttcatgaacaaggggcatccttagtcatcaggctgtctccagaggacacggaaagccggcacaaaccttctgttaactatttatttgaatccatcagcaatataaaggggtacgagaaaattgctgtcattatgacaggcatgggtagtgacggcacagaaggtgtcaaaaaaatggtcgcaagcggtcatacgaaagtcattgcagaaaaagaagaatcatgtgttgttttcggaatgcctaaatcagtcattaaagcaggccttgcacatgaaacaaggcatgtggatgacatcgcacatgcaattataagctccatgaaaaaagagagggcgtgaacacgttggatgtaaaccaatacttagatatctttttagatgaaagcagagaacatttacaaacttgtaatgaaaaacttcttgatttagaaaagaacccaaccgacttgcagctagtgaatgatatattcagagcggctcacacattgaaaggcatgagtgcaacgatgggctacgctgatatggctcagctcacacatcatttagaaaacatgtttgatgccattcgaaatgaacaaatgattgtcacacctgagtcaatggacacgatgtttgaagcacttgatcaccttgaagcaatggttcaatcaattgcagaaggcggagatgggaaacgcgatgtcacagaggttagtaaaaagctagatgtgacaggaagccatgctgaggcagctcctagtgttgaaacagcggatgtatcagctgcggctgctaacgacttagactataacgaatttgaacgaacagtgcttgatgaagcgagagaacaaggctttaaatgttatgaactcaatgtaacattaagtgacgcatgcttattaaaagctgttcgtgtctatatgatctttgaaagactgaatgaagcaggcgaggtcgtcaaaacagttccaaatgcagaacttttagaatcagaagatttcgaatctgaattcagtatttcttatttatctaaacaaccgatggatgaagtgaaaaaaatcgtgatggcgatctcagaagttgaacatgttgagatctcagaagtctctgcatttgaagaagcggctccagctgaaaaacaagaggcaaaacctgaacaggaaaaagaagaagtatctgtgcctgctgcgaaagcaccagcaagcgatgcgccaaaagcaaatggcaataacggtgcagctgccggcggaacaaaaacgattcgtgtcaacattgaccgtctcgattctctaatgaatctatttgaagaactggtgattgacagaggccgtttagagcagatagccaaagaattagaaaataatgaacttacagacacagttgaaagaatgacacgtatttctggagacctgcaatcgatcatcctgaacatgagaatggtacctgtggaaacagtgtttaaccgattcccgcgtatgattcgtcaattgacaaaagagctgaataagaaaattgaactgatcattgaaggtgctgagacagagcttgatcgaacagtcatcgacgagattggagatccgctcttacacttacttagaaacagtctagatcacggaattgaatcgccagaagaacgtgtgaaaaaaggcaagccagaaaaaggcaccgttctattaaaggcgtatcatagcggaaaccacgtcttcattgaagtagaagatgatggcggcggaattaaccgtaagaaagtgcttgaaaaagcattagagcgcggggttattacagaaagagaagcagagacgcttgaagatcatcaaattgattcattgatcttcgcagcaggtttctctacagctgatacgatttctgacatctcaggccgcggtgtaggccttgacgttgtgaaaaacaagctggaatcactaggcggatctgtgagcatcaactcaacagaaggacagggctcactattctcgatccagcttccgcttacattatcgattatttccgttcttcttgtgaaattggaagaggaaacatttgcgattccgatttcttctattattgaaacggctgtcattaagaaaagcgacatccttcaaacgcatgatcgtgaagtgattgatttccgcggatttatcgtaccggtcgtgtacttgaagaaacaattccacgtaccaaatgcgaatgaattagaggaagaactgcacatcatcgttgttcgtaaaggagataagctgacagcatttgtggtcgattcatttattggtcagcaagaggttgtattgaaatcactaggagattacctgccaaacgtgtttgcgatctcaggcgcaacaatcctaggtgacggtcaagttgcactcatcgttgactgtaatgcactgatcaagtaaaaaacaatagaggagcggtctgaaatgagtacagatatcaaaactggcgaaaagatgattgtgtttatcgtaaacaaaaaagaatacgccatttcagtatcagaagtaaagtccattgaaaaatggcagcagccgacaagagtccctggcgttgccccttatatatgtggtgttattaatctgcgcggtgtcgtgacacctgtcatcgaccttagagtcagacttggatcaactgacaacgacattacagatgaaacaagaatgattattgtacaagttggtgacattgaagtcggctggattgttgatgaagcgaatgatgtcattacagtccatcaagaagaagtagaatcttctcctgaatcagctgaaaaagaaggacaatcatgggtgacaggtatcattaagcatgatcagcgtctatttaatatcattcatcctggtgccgtcctcgacaagagcgttcaagatgcacctgttcattaaggaggatgtgaaatgagcattttcaatgaaataaaagatgaacagctggatgtattaagagaggttgggaatattggagcagggcacgccgcgtctgctcttgccagcctattggatcgcaaaatagatatggctgttccgtttgtcaaggttctctcgtttgaagaattaatggatttctttggcggtgcagacctcccagttgcaagtattttcctgcggatggaaggagatttatccggctctatctttttcattatgccatttgagcaagcagagcaatttgtaagagagcttgtacaggatccggcatttgatattgataccattcacgagcatgtgatggggacgtcagcactacacgagctgggaaatattttagcaggctcttatttatcagcccttgccgatttaacaaaattgcagcttcacccaagtgttccagatgttacgctcgatatgttcggggctgtcattagtgaagggttaatgcaattcagccctctaggggatcaggcaattgtgattgatacatcgatttttgatgatcaaaataagcaagagctgaaaggaaatatgtttctattaccagactttgaatcgtttgaaaaactattcaaagcattaggtaacctgtaatgaacgttcagattccggcagttgtaaaggttggtatagcggatgttcagattgtgaaaacaccggaccgcattcggacatccggacttggttcttgtgtaggacttgttctgtttgatcaagaaaaaaaactggcaggtcttgtccatgtcatgcttccagactcatcccttgcaaaaggggcagtggagaacttggctaaatatgcagatacaggtgtcaagcatacaattgatctgcttcttaaagaaggagcacgcaaacatgcgctaaaggcaaaacttgctggcggcgcagaaatgtttaagtttaagtcaaccaatgatctgatgagaattggacctagaaacgtatcagctgttaaagaacatctgtctctttatcgcatcccgatcattagtgaggatacgggcgggaacaatggccgtacgattgaatttgatccgcttacgacagagcttgagatccgcactgtgaagcaaggcattatgaagatataactaaggaagtatagggggagaaagatgcaatccttaaattacgaagatcaggcgctatgggctagatggaaagagtggaaggacccagctgctggagatgatcttatgcgccgctatatgccgctcgtcacatatcatgttggaagaatttccatcggactcccgaagtcagtgcataaagaagacttgatcagtctagggatgctcggtttatatgatgcccttgaaaaattcgaccccggaagagatctgaagtttgatacatatgcatccttcagaatccgcggggccatcatcgacggtcttcgtaaagaggactggctgcctcgtacatcaagagaaaaaacaaaaaaagtagaagcggctattgaaaagcttgaacagcgctatttacgaaatgtgacgccgacagaagtggcagaggaacttggcatgagtgaacaggatgttgtcacaacaatgaatgaaggattctttgcgaatctgctttcaatcgacgagaagctgcatgatcaagaagacggtgaaaacgtccaagtcatgattcgcgacgagaaaacagtgacacctgaagagaagatgctgaaagatgaattaatagaacagcttgctgaaaaaatgaccgagctatcggaaaaagaaaagctcgtgatcagtcttttctataaagaggaactgacgttaacagaaatcggtcacgtgctcaatttatcgacctcgcgtatttcgcaaattcattcaaaggcattgttcaagcttaagcatctgcttgataaagccattcaatcttaaagagttagtgagtgaaaaaatatgttatggctgattagcttcatgcttcatgctgcacttatttattttgtgatcattttatatacgagaatgaattcgctgaagataactgaacaaaagcagcgagaacttctagaagaaacggaaaataccctggctgcatttttgatggaagtcaaagaagagaatgacaaactatcaaaagtggcagccgcttcccctgatttttctgctgaagagctgaaatcggattttcagacaccaaagcagccacaaccaccaattgaatcccagcaatcggtagaaagtgaagatccagtaccagagcacttgtcggctctccttagtgaagttgaagtgcaggaagagaaggtaaacgaacccgttccacatcttgaatcagaagcttctgtgccttctgaaagtgaaatagaagaaacattcgaggaccaagtgaagaccttatatgacaaagggcattcgctagaagaaatagcgaaagaactgaaaacgggcaagacagaaatcgagcttttattaaaatttagcggaaagctgtaaaggattcttgattgtcagtccatcatgtgttatattatttcttggtgttaaatacacacgcttaatgattcgtatgaaggtgctgccgtggcgcagttttatgtgaacatgacttgagcggaggaaaaaaaaccattatattaggaggcaacaaaatgtcagttatttctatgaaacaattgctagaagctggtgttcacttcggtcaccaaacgcgccgttggaacccaaaaatgaagcgttacatctttacagagcgtaacggtatctacatcatcgatcttcaaaaaacggtgaaaaaagtagaagaagcttacaacttcacgaaaaaccttgctgctgacggagggaaaatccttttcgttggtacgaaaaagcaagcacaagattcagtgaaagaagaagcaatccgttctggtatgttctatgtgaaccaacgctggcttggtggaactttaacaaactttgaaacaatccaaaaacgtatcaaacgtttaaaagatattgaaaaaatgcaagaaaacggtacattcgatgttcttcctaagaaagaagtcgttcaactgaaaaaagaattagagcgtcttgaaaaattcctaggcggaatcaaagacatgaaaggtcttccggatgcacttttcattatcgaccctcgtaaagagcgtattgcagttgcagaagctcgtaaattgaatatcccaatcatcggtatcgttgacacaaactgtgatccagacgaaattgatgttgtgatccctgcaaacgatgatgcaatccgtgctgtaaaacttctaactgctaaaatggcagatgcgattcttgagtctaaacaaggcgaagaagaagctgttgtagaagaaacgacagaaactgaaacaacaactgcgtaacctattcaaaaggtgataagagggaaatgccttttatcacctttttttcacctagtaatccgtgttttaacatagaaggaggaaatgtaaaatggcaattactgctcaattagttaaagaactgcgtcaaaaaactggtgcaggtatgatggactgtaaaaaagcgttaacagaaactgatggtgacatcgacaaagcaatcgatcttctaagagaaaaaggaattgcaaaagctgcgaaaaaagcagaccgtattgctgcagaaggattaactcttatcaaaactgacggcaacacaggcgtgatcctagaagtgaactctgagactgatttcgttgcgaaaaacgaaggattccaatcacttcttaacgaacttgctgatcatttgcttgctgctaaacctgcaacaattgaagaagctcatgcttctaaaatggaaaacggttcaactgttgaagagcatatcacatctgcaattgcaaaaatcggagagaaaatcactctacgtcgtttctctgttatcacgaaagaagataacgcagcattcggttcttacttacacatgggcggacgcatcggtgtgttagctgttcttaacggaacaactgacgaagagcttgcaagagacattgcaatgcacgttgctgctgtaaaccctaaatacatttctcgtgaccaagtgtcagaagaagaagcaaaccgtgagcgcgaagtattaacacagcaagcgcttcaagaaggaaagcctgaaaatatcgtagctaaaatggtagaaggccgtctaaacaaattcttcgaagaaatttgcttacttgaccaagcattcgttaaaaacccagatgaaaaagtgaaacaagtagtagctgcgaaaaacgcaagcattcaaacttatgttcgctatgaagtgggcgaaggtattgaaaagcgtcaagacaactttgctgaagaagttatgagccaagtgaaaaaataatgtttgaaaagctctctggggcttttttagggagcacaagcactgtgttccctattttttagaggatattgatttacaaaagacagtttcttacgcataataagagacggtatagtttacacttggaggttatcatgagcaaaccgaaatataatcgcattgtactgaagctaagtggcgaagcactagcaggtgatgctggaaatggaattaacccaactgtcattcaatcaattgcaaagcaagtaaaagaaattgcagagcttgatgttgaggttgcagttgttgtaggcggaggaaacctttggcgcggtaagacaggcagtgacttgggaatggaccgtgcaacagcagactacatgggcatgctggcaacagtgatgaattcactcgcgctacaggacagcctagaaacgcttggcattcagtctagggtacaaacctctatcgaaatgagacaggttgcagagccatacataagaagaaaagcgatccgtcatcttgagaagaaacgtgtcgtgatttttgctgcaggtactggtaacccttatttctctacagatacaacggcagcacttcgtgcagcagaaattgaagcagatgtcattttaatggcgaaaaataatgtagacggtgtctacagtgctgatcctcgtacagatgcggatgcagtaaaatatgataagctttcatatcttgacgtgttaaaagaagggcttgctgtaatggattctactgcgtcctcattatgtatggacaatgacattccattaatcgtattctccattatggaagaaggaaatattaaacgtgccgtcaatggcgaatcaattggaacgattgtgagggggaaataacgtgtcaaaagaagtattgaaccaaacgaaagaaaaaatggaaaaagccgttcaagcatacggacgtgaactagcaactgttcgtgcgggcagagcaaatgcttcattgcttgataaagtgacggttgattattacggtgcacaaacaccactcaaccaaatcgcgtcaatcacagtgccagaagcacgtatgctgattatcacaccttatgataaaacagccatcggtgatatcgaaaaatcgatccaaaagtctgatcttggcatcacgccaacaagtgacggaaatgtgatccgcattgcgattcctgcactaacagaagaaagacgtaaagagcttgtgaaagtggtaagaaaatattcagaagaagcaaaagtagctgttcgtaatgttcgtcgtgatgcaaacgatgagttgaaaaagcttgagaaaaatggtgagatcactgaagatgaattaagatcatcgacagaggatgttcaaaaattgacagatgaatatgtcgctaaaattgatgacgtgacgaaagataaagaaaaagaaatcatggaagtttaagaaaaaactatgtacaatagataatagtgaaaagaccctcttcatgtttacagggggtttttttgttaatactgttggtgactatattattagcgggaacgcaacctttttgggtgatggaggaatctcatgctcaatatactcaaaaattggaagaatcagcaaactgctgcttccaacttagaaagcctgacaaaagaagacatattaaatggagaaattcctgaacatatcgccattatcatggatgggaacggaagatgggcgaaaaaacgtgctcttccacgggtagcaggacatcatgaaggaatgaaagtcgtcaagcgcatgacaaagcttgcaaatgagctgaatgtcaaagtgctgactttgtatgctttctctacggaaaattggaaacgtccaaaactagaagtagactttttaatgaagcttcctgaagaatttttgaacatctacctgcctgaactcatcgaggaaaatgtccgtgtgcgcttaacaggtgatccagacggcctcccgcagcatacgaaaagagcggtagagaacgcagtaaagagtacggcgaataacgacggactcgttttgaattttgcgctcaactatggagggcgcacagaaatcgtctccgcatgcagacaaatttctgaaaaagtcaaagaaggtaagcttcaagcagaagacatcacagaagagatgttttcagcttatttaatgacagaatctcttcaagatccggatttgcttattcgcacaagtggagaaattagattaagtaactttatgctttggcaaattgcatacagcgagtttgtctttacggatgtgctttggcctgacttttctgatgagcatcttataggcgctatcggagaataccagcgccgcggccggaggttcggtggaatttagagggtggtgcagatgaaacaaagaattttgacgggtgttttggcagctgcagtctttttacttgcggttatatatggacagatgccatttaccctgctgatttacttaatgggaagtgtcgctctctttgagcttctaagaatgaaaaagatatcgattttcagctttcctggtattgtcagcttaatattgctttggcttttaatgggcggagagaacagcttcttcccgaacgtagacgcatcaaaaatgcaaattgctttatttgcagtcttaatccttttaacttatacagtgttgagcaaaaactctttcacattcgatgaggttgcttttgttgtattagcgacattatatattggcgtcagtttctattatttcatccaaattagaggcttatatggcatgagtgcgatcttcttcgcagcagtgattatttggtccactgactcaggtgcttactttattgggaaatctatggggaaacgaaagctctggccagagatcagtccaaacaaaacagtagaaggatttatcggcggaatcgtcacagcggtcgtgttgtcatttgtgtttcaggcggttacaggatttttgccatcatatctgcttgttatgtttattactcttttgctcagtatctttggacagcttggcgaccttgtggaatctgctttaaagcgtcattatcacgtaaaggattcagggacaattctccctggacatggcgggattttggacaggtttgacagctttttgttcgttctgccgtttttatatttactgctcgcaacgtttgccagctaacctcatagaaacttattgaacgagagaaggagtggcaatttgaaatatatttcgctattaggcgcaacaggatcaattggagaacaaacattagatgtgattaggcagcacccagacaaatttaagctgaaagccatgacatttggccgaaatgtagataaggccattccaatcatagaacagtttcagcctgaatttgttggatgtttaagtgaagagacttatcagacgctaaaaggtcattcatttgaatacgatgtcaagatggctgctggtgatgaagccaacatcgaggcagcgacctatgatgcagtggacgttgtggtcaatgcacttgtaggaagtgttgggcttgttccaacattaaaggccattgaacaaaaaaagacgattgcactcgcaaataaggaaacacttgtcacagctggtcatatagtaaaagagtacgcgaaaacatatgatgtacctttacttcctgtcgatagtgagcattccgctatttttcaatgcctgcaaggtgaacaagctaaaaacattgaacgcttaatcgtgacagcttcaggtggtagtttccgagataaaaaacgaactgaacttgaaggtgttacggttgaagaagcgctgaaccacccaaactggtcaatgggagcgaaaattaccattgattcagcgacgatgatgaataaagggctcgaggtgattgaggcacattggttgtttgatataccgtatgaacaaattgatgtgctgttacataaagagagcattatccattcgatggtggaatttcacgacaaaagcgtcatggctcagttagggacaccagacatgagagtgcccattcaatatgcactcacataccctgacagggcgccattaccagaagcgaaatcattgaacctttgggagattggacaattgaatttccaaaaagcggattttgacaggtatcgctgcttacattttgcttatgaatcaggtaaaataggagggacaatgcctgctgtgctcaatgcagcaaatgaaatggcagttgatgcatttctgaaaggcaaagtaacgttcctgcaaattgaagaattgattgaaaaggcactaaatagacatcatgtgatttcaacgcctagtttgcaagatatccatgaagtggacaaagatacacgagactttgttcaatcaatcctcacataaggtggtatgttcgtgaatacagtgattgcgtttattattatttttggaacgctcgtttttttccacgagcttggccatttaattatggcgcagcgagcggggattttatgccgcgagttcgcaattggttttgggccgaagattttctcctttaaacgaaaggaaaccgtttataccattagactgctccctattggcggatttgttaaaatggcaggagaggaccctgaagtcattgaaattaaaccaggtcatacagtggggctcttattcaatgagcaaaatgaagtagaaaaaatcattttaaatgacaaagaaaaatatcctgatgcacttgtcatcgaagttgagcagattgatttagatcatgccatgagaatctcaggatatgaagctggaaatgaagatattttaactggctacaatgtcagtcaaacaagcttttatattgcagatggtgaagaaattcaaatcgcaccatacaatcgtcaatttggatcaaaaacggtatggcagcgtattaaagcgatcgcagctggaccgattatgaactttatcctggcgtatgtgattttggttgctttaggctttattcaaggggtaaccgttgatgatcctatactcggcaagctgacgaaagacggccgagcggcagaagctggactcatgcagggagaccacatcgtgtccattaacggggataaaatgaattcttggacagacgtcgttcaaaccgttcaaaagaaccctgagaaaaaaatgaatgtcgtcattgaccgagacggcaaagaaagcactgtgcaggttgtaccagaagctgtgaaagcagacggaaaaagcattggccgtttcggatcttatccgccaactgaaaatggatttctgaaggttatttcatcctcaggaacgactgtgatttcaacagcaggactgattttaacgaacttgcaaaaaattgtcacaggacaattttcactagatatgttagcaggtcctgttgggatctatgacatgacaggagaagtagccaagcaaggtgtgttaacattaatgcagtttgcggcgttccttagtatcaacttaggcatcgtgaatttattaccgattcctgcactagacggaggacgtttactattcttgtttgttgaagccattcgtggtaaaccaattaatcgtgagaaagaagcacttgttgtctttatcggtgttgcattcctcatgctgttaatgctagtggttacgtggaatgacatccagcgattatttttataaaaaccaatgtctcttgtttctcattacgggaaacaagagtttttgtgagtagtcctatttcataaatgaggtgtaacgacatgagacaatccctgactttcattccaactcttcgagaggtgccggcagatgctgaggcaaaaagtcatcagctcttagtaagagctgggttcattagacaaaatacaagcggaatctatcattatctgccgcttgctcataaagtcatccagcatattcaatccattgttcgcaaggaaatggaaaaggcaggagcagctgagctgttaatgccagtgctgcagcaggcagaaatgtggcaagagtcaggaagatggtatacatacggtccagaattgatgcgtatgaaagatcgtcatggccgcgagttcgcacttggcccaacgcacgaagaggtgatcacatcactcgtacgcagcgaagtaaaatcgtataagaagcttcctttaactctttatcaaattcaatcaaaattccgcgatgaacagagaccgcgttttgggctgctgcgcggacgtgaatttattatgaaggatgcgtactcattccattcttcaccagaaagccttgatgacacatacaacaagatgtttacagcttactccaatgtattctcaaaagtaggtcttaattttagaccagtcattgcagattctggtgcaatgggaggaaaagatacacatgagtttatggcactgtcagaagtaggagaagatacaattgcatactctgacacatcttcctatgctgcgaacattgaaatggctgaagctgtttatcacggagaagaagcaaatcctgcggacttcaaagaacttgaaaaagtccacacaccgcaagtgaaaacgattcaagacatcgctggatttttagaagttgattcttctctttgtatcaaatctgttttgtttaaagcagatgatgcgtatgttctcatcctgactagaggcgaccatgaagtaaatgatgtgaaagtgaaaaacttggtaggagcacagcttgtagagcttgctactcgcgaagaagtactagaagtcattggaacagagcctggatttgttggtcctgtgaagctggaagcagaagtcgatatttatgcagaccttgcggttaaaggcatgacaaatgctgtcgcaggtgcaaacgaagcggattatcactatgtcaatgtcaatcctgcgcgtgatgtatcagtgaaagaattcacagatcttcgtttgattcaagaaggagatgtttctccagatggagaaggcacaatccagtttgccaaagggattgaagtaggacaagtctttaaactaggcactcgttattctgagtcaatggatgcgacgtacctcgatgagaatggacgagcgcagccaatgattatgggatgctatggtatcggtatctctagaactctttcagcaattgttgaacagcatcacgatgagaaaggaatcatttggcccgaaactgttgcgccatatgaccttcatctccttgcattaaatatgaaaaacgatgctcaaaaagagctggctgaaacgttatacgagcgcttagaagatgagggctttgacgtacttttcgatgaccgccaagagcgtgccggagtaaaatttgcagacagtgatttaattgggctgccaattcgcattagctgcggaaaacgttcagaagaaggcattgttgaagtgaagtttagaaaatcaggtgaatcacatgaagtatctgttgatgagctgatttcatttatacgccaagcataaaaacgaacaaaaaaatgaaggtacctcctgtagaaaagaggtacctttctgattgacaaaaggagggttctgtcttggatgaacaattaccgatcacacggcggcaatttcatatattactcaatcagattcaaatgacagatgatgacctcagtcgttactttgaagaaggagaaatcgtcaaattgacggtgcataaggcgacgaaaacgtggcatttcctttttaaatttaaggcgcttctgccttacaaggtatatgcgatgtttctcagcaggctgacaaatgcattttctcatattgcacaagtcacttgtacgattgaagtcaatgatccgaacatctctgaagagctcgttcaatcgtattggtcacattgtgtggaagagcttcaaggaatttctcctccaatcatcagcttgcttcagcagcaaaaaccatcgctgtctggacataaaatcatcatcaaaacgaaaagcgaaacagaggctttggccatcaagaagaagtacagcccaatgctccaggctgcttttaaacaagtgggctttccagagctgcaattcgatacagaaatttttgtatcagatcaagagattcagaagttcagagaacaaaagcttgctgaagatcaagaaagagcgatgcaagccctcactgagatggagaagaaggaaagtgaggagcaggatgaagctccgtctggccctctcatgattggctatcaaattaaagacaatgaagaaattcgtacgcttgatagtattatggatgaggaacgaagaatcaccgttcaaggctacgtattcgatgcagaaacgcgtgagctgaaaagcggcagaacgctttgtatctttaagattacagattatacaaacagtattttaatcaaaatgtttgcaagagaaaaagaagatgcccagctgatgaaatcattgaaaaaaggcatgtgggtcaaagcaagaggaagcattcaaaacgatacgtttgtcagagaccttgtcatgattgccaatgacgtcaatgaaatgaaacctcagctgaaagaggatacggcacctgagggtgagaaacgtgtcgagcttcatttgcattccccaatgagccaaatggatgctgtcactggcattggcaggctggtggaacaagcaaaaaaatggggacatgaagcgattgccctgacggatcatgcggttgtacaatccttcccagatgcgtatgcagcaagtaaaaagcatgacatcaaaatgatgtacggtgtggaaatcaacttggtcgacgacggagtacccattgcctataatccggagcaccgtttgttagatgacgcgacgtatgtcgtatttgacgtagagacaactggactttcagccgtttatgacacgatcattgagctggcagcagtgaaaataaaaggcggggaaatcattgaccgctttgaggcatttgcaaatcctcatcacccattatcagcgacaacgatcgaattaacgggtattacggatgatatggtcagagatgctccagatgtcgtcgatgtcgtgcgcgatttcaaagaatggattggacaagatatccttgttgcgcacaatgcaagttttgatatgggctttttaaatgcagcgtacaaacgcctgttaaaaacagataaagcgtcaaaccctgtgattgatacacttgaactcggccgattcctttaccctgaatttaaaaatcaccggctcaatacactttgtaaaaagttcgatatagaactgacgcagcatcaccgggccatttacgatgcagaggcgacaggctacctcatgctgaagatgctaaaagatgcggctgaaaaagaaattgcctatcacgatcaattgaatgaaaacatgggtcagtctaatgcctaccagcgctcacgtccttaccatgccattctgatcgcacaaaatgagaccggtctgaaaaatttattcaaacttgtttctctttctcatattcattatttctaccgggtgccgcgcattccgcgctcacagcttgagaaatatcgagaaggtttaattatcgggtctgcctgtgataagggtgaggtctttgaagggatgatgcaaaaatcacctgatgaggtggaagacattgcagcattttacgactatttagaagttcatccgccagaagtgtatcagcatctgctgcagctggagcttgttcgagatgaacgtgcgttaaaagaaatcatcacaaacattgtgaagcttggcgaaaagctcaataaaccagtcgtggcaactggaaatgtgcattatctgcatccagaagacaaaatttatcgtaaaatcttaatttcatcacagggtggagcaaatccgcttaaccgtcacgaactgccaaaagttcattttagaacgacagatgaaatgcttgaagcattctccttcctaggagacgaaaaagcgaaagagatcgtcgtggcgaatacgaaaaaagtatctgagatggtcgaaagcattaaaccaatcaaagatgacctatacacaccaaaaattgaaggtgcagatgaagaaatacgggaaatgagctatcaaatggcgcgcagcatctacggagatgatttgccgaaaattgtagaagaccgtattgagaaagaattaaaaagtattatcggccatggatttgccgttatttacttaatctctcataagcttgtaaagaaatcacttgatgatggatatcttgttggttcaaggggatctgtcggctcatctcttgttgcaacattaacagagattaccgaagtgaacccacttgccccgcattatgtatgtccaagctgtaagcattcggagttctttaatgacggatctgttggttcaggctttgaccttcctgacaaagactgtccagaatgtggtacgccgtacaaaaaagacggacatgatattccgtttgaaacgttcttaggttttaaaggagacaaagtccctgatatcgacttgaacttctcaggtgaatatcagccgattgcacataactatacgaaagagctgttcggtgaagagtatgtataccgagcaggtacgattggtactgttgcagaaaaaacagcttatggttacgtgaaaggctacgctggagatcataatcttcatatgaggggcgcagaaatcgaccggcttgtccaaggctgtactggggtcaaacggacaacgggccagcatccaggcggtattatcgtagtgccggattatatggacatttatgatttctcaccaattcaatatccagcagatgcgacaggttctgattggaaaacgacgcattttgatttccattcaatccatgacaacttgctcaagcttgatatactagggcacgatgatccaacggttattcgtatgcttcaggatttaagcggaattgatccaaaaacgattccaacagacgatcctgaagtgatgaaaatttttcaagggacagagcctcttggtgtaacagaagagcaaattggctgtaaaacaggtacactcggtattccggagtttgggacaaggtttgttcggcaaatgcttgaggatacaaaaccaacgaccttctcagagctcgttcagatctctggactatcacacgggacggatgtatggctcggaaacgcgcaagaactcattcacaataaaacgtgtgaactaagtgaagtgattgggtgtcgtgacgatattatggtctatctcatctatcagggcttagagccgtcactcgcatttaaaatcatggagtctgttcgtaaaggaaagggacttccccctgaatgggaagaagaaatgaagaataataatgtaccgaactggtatattgattcttgtaaaaagatcaaatacatgttccctaaggcccacgcagctgcttacgtattaatggctgtacggattgcctacttcaaggtgcatcatgcacttttatactatgcggcttactttaccgttcgtgcagatgactttgatatcgaaacaatgacaaaaggatcgaatgcgattcgagcagtcatggacgatattaactcaaaaggtctagatgcatcgccgaaagaaaagaacctattaactgtactagagcttgcacttgaaatgtgtgaaagaggctaccatttcaaaaaagtggacctctaccgatcaagtgcaacagagtttatcattgatggagatggattaattccgccattcaactcgatccctggactcggaacaaacgttgcgttaaatattgttcgcgcacgacaagacggggaattcctttcaaaagaagatttacaaaaacgcggaaaagtgtcgaaaacgatcctagaatatttagatcgccaaggctgcttagaagcacttcccgatcaaaaccagctttctttgttttaatgcgattcatgaagagcgtccttaaaggggcgttcttttttcatatacaataattttattatgttaactaaaaaagatttcccatcaaatggaatcattttcttattcattcatataccttgatttaacgtgatgttttaagagaagagattgtatgtcattctttctacccaaatagagcaaaaaagagaatttcgccgtctgaaatgttctcatgcgacatatgatcattctgggtacagtcacaaaaagaatcaagagaaaaaaccttcgatgagcgtaaagctgattgctgtttactatgcttatttttgaaacgtatttgattcttttcaaaactgttcaaatcacgttctgaataaaaggaggtggcttgtctattcatgtttgactaaaaagaaggagtgagtcatacggaaatggcatcttataactatgtagaggttcttcaaaaatccttgttgttttatgcagcgcagcggtctggaaagcttcccgaaagcagccgtctcaactggcggggagattctggactagaggacgggaaggatgtagggcatgatttaactggcggctggtatgacgcaggtgatcatgtgaaatttgggcttccgatggcctactcagcagctgtgcttgcatggacagtatatgaataccgagaagcctatgaagaggcagaactgcttgatgacatcctcgatcaaatcagatgggcaacggattattttttgaaagcacatacaggtccgaacgagttttgggcgcaggtaggtgatgggaacgctgatcatgcttggtggggaccggcagaagtgatgccgatgagccggccagcttttaaaattgatgaaaattgtccaggaacagaagtagccgcacaaactgctgcagctttagcagcgagttctatcatttttaaagagacagatgccccttatgcagcaaagcttctgacccacgcgaaacagctttatgcatttgctgacaggtatcgcggcgagtatacagattgtgtcacaaacgctcagccgttttacaactcctggagcggctatattgacgaactcatttggggcggaatctggctgtacttggcaacaaatgaagaaacctatttaaatcaagcactaaaagcagtagaggaatggccgaaggattgggattatacgtttaccatgtcatgggacaatactttttttgcttcgcaaatcttactcgccagaatcacgaaagaaaatcgatttatagaatcgacagagcgtaatctcgattactggacgacgggttttgttcaaaatggaaaagtcgaaagaatcacttatacgcctggcggtttggcatggctagatcaatggggatcgcttcgttatacagcaaatgcagcatttttagcctttgtctatgctgattgggtttcagatgaagaaaaaaagaatcgatatcaaacgtttgcgatcaagcaaactcactatatgctaggtgataatccgctaaatagaagctatgtcgttgggtttggccagaacccgccgaagcatccacaccatcgaactgcacatggctcatggtctaaccagctgacaaatcctccgtatcatcggcacactctttatggagcgcttgttggtgggcctaatgcacaggatcaatatgacgatgacatctctgattatgtatcaaacgaggtggcgacggactataatgccgcctttactggaaatatagccaaaatggtgcagctgtttggaaaggggcaatctaagcttccaaatttcccgcctaaagaacaggctcaggatgagttttttgtagaggcagctctgatgaataacgatacaacatcaactcaggtgaaggcggttctatacaatcggtccggctggccggcaagaagcagtcaaacgctgtcctttagatattatgtcaatctgagtgaggtctttgcaaagggattcactgaaaaagatattcaagtgacagcagcctacaatgaaggcgcttccttatctccgctgaaggtatatgacgcatcagcccacgtatattatgcagaaattgattttacgggcgtagcgatttttcctggaggagaatcagagcataagaaggaaatacaatttcgattatctgcaccaaatggggcgaatatatgggatgcctcaaatgattattcctttcaaggcttaacttccaatatgcaaaaaacagcgaggattcctgtttttgatgatggtgctttggtatttggtgcacttccagacaaataaaaatcaagatgtattgaaagggtgaagaacttgtcaaacaaagaacggtttttaacgctttatcatcaaattaaaagtgatgcgaatggatatttttcatcagaaggaattccgtatcattcaatcgagacgctcatttgcgaagcgcctgattacgggcatatgacaacttcagaagcgtatagctattggctgtggcttgaggtgttgtacggacattacacaggggattggagcaaattagaggcagcctgggacaatatggagaagtacatcatcccagtaaatgaagatggaaatgatgagcagccgcatatgagcgcctacaatccttctagcccagccacatacgcagcagaaaaaccatacccggatcaataccctagccagttaagcggtgctcgtcctgcgggtcaagatccgattgatggtgaattgaaatcaacctatggaacgaatgaaacgtatttaatgcactggctgcttgatgtcgataactggtataaatatggaaacttgctcaacccatcacataaagctgcatatgtgaacacattccagcgtggtccacaggaatccgtatgggaggccatccctcatccttcacaagatgataaatcttttggaaagccgaatgaaggctttatgagcttgttcacaaaagaaaatcaagcaccagctgctcagtggcgctataccaatgcgacggatgctgatgcgcgtgcaatacaagtgatgtattgggcgaaggaactcggctataatgagtcagcctatcttgataaagcgaaaaaaatgggggattttcttcgttacggtatgtacgataaatattttcaaacgattggaagcggcaaacaggggaatccgtaccctggaaacggaaagggtgcctgtcattacttaatggcgtggtatacctcttggggcggaggacttggcgaccatgccaactggtcatggcgtattggagctagccattgtcaccaagggtatcaaaaccctgtcgccgcttatgctttatcctcagacaaaggaggcttaaagccatcttccgctactggtgcaagcgattgggaaaaaacattaaaaaggcagcttgaattttatgtatggcttcaatctaaagagggagcgattgcaggaggtgcaaccaatagctggaatggagactatagtgcttatccggcgggaagaagtactttttacgatatggcatatgaggatgcacctgtttatcttgacccgccttctaataactggtttgggatgcaggcatggccgatggagcgcgtagcagagctttattacatttttgtgaaagatggagacaaaacatctgaaaatgtccaaatggccaaatcttgcatcacaaaatgggtcaactatgcattagattacatttttatcggcagccgtcctgtgtcggatgaagagggttatttcttagatgaccaaggacaaagaattctaggaggaacaaatgctgctgttgctacaacgagtgcacctggcgagttttggcttcctggaaatattgcttggagcggacagcctgacacttggaatgggttccagtctgcaacaggaaatccaaacttaacagctgtaacaaaagatccaactcaggatacgggcgtactagggagtctagtcaaggctttaactttctttgctgctgccactaagctagaaacaggggattatacagcgcttggtgtcagagcgaaaggtgctgccgcacagctccttgaggttgcgtggaattacaatgatggcgtgggcattgtaacagaagaagaaagagaggactatgaccgcttctttaaaaaagaagtgtatttcccaaatggttggaacgggacatttggtcaagggaatcagattcctggagccagcactattccttctgatccgcagcgaggaggtaatggggtctatacgagttttgctgatcttcgtccgaacattaaacaagatccagcatggtcttcactcgagagtaaatatcagtcttcatttaatgaagcaacaggcaaatgggagaatggggcaccggttttcacctatcaccgtttctggtctcaagtggatatggccactgcctacgctgaatatcatcgtctcatcaactagcaagtcaaatttaagctgccggtttctttgagccggcagtttgattaggaaatataaatccagtgaagataagggtgtttttacatggtcaaagaaagaagttttcttcatcaatcattaaacaagggcgaaaatgggcagataaatctgaagtggaaaaaagaggcgaatgatcgaatttcagagcatagacaaagagatcttgaaataaatgtcacaaatcacgaaaaaaagccaatagcaggtatagaggttgagattaagcaaaataggcatgaattcgcatttggttcagcgatgaatgaccaagtgttgtttaatcaacaatatgccgatttttttgtgaagtattttaattgggctgtttttgaaaatgaggcaaaatggtatgcgaatgaacctgaaagagggaaaatcacttacgaaaaagcagatgcgatgctgaattttgcagataaacatcaacttccagtgagagggcacgctttattttgggaggtagaggatgcgaatccaagctggctgaggtcactaccgaatcacgaagtgtatgaatcgatgaaaaaccggcttgagcatgcgggtaatcattttaaagggagattccgtcattgggatgtaaacaatgaaatgatgcatggttcattttttaaagatcgcttcgggaaaaatatttggaagtggatgtatgaagaaacgaaaaaaattgaccctcaagcactattgtttgtgaatgattataatgtgatctcatatggtgagcatcacgcttataaagcgcatatcaatgaactgcgtcagttaggcgcacctattgaggcgattggtgttcaaggacattttgaagaacgggtcgatccagtcgttgtaaaagagaggctcgatgtgcttgctgagcttggtcttcctatatgggttacagagtacgattctgttcaccctgacgctaatagaagagcggataacctagaggctttatatcgcgtcgcatttagtcatccagccgtaaaaggagtgctaatgtggggattttgggcaggtgcccattggagaggtgagcatgcggccatcgtgaattatgattggtctttaaatgaagcaggccgacgttacgaaaagcttctaaatgagtggacgacacaaagagttgaaaaaacagatgcgaatggcaatgtgacatgtcgagcatttcacgggacatatgagattcgaatcggtaaagaaagtaaactgttaaaacaacaaacaattgaacttgattcaaatgaacaaacaccgcttcggctagatgtgatcgtacctgaagaaggctagattgtgaggggaatttaaatgaagaaatggactcaaagagtgtcttgcttcatacttgtggtcgctatatgggccggctggttttcacttacgattaaggccgcctcttatgtacagacgtctggtacacaatttatgctgaacaatcaaccattttacttcgctggcacaaataattactatttccattacaaatctaaaaagatggtagatgctgtgttcgatgatatgaaagcaatgaatttaaaggtcatacgtatttggggatttcacgatggggcccctcaagaaaactcagttttacaatctagtccagggatctatgaagaatcgggttttcaaaaactagattatgcgatttataaagcgggacaggaaggaataaaacttgtcatcccactagtcaacaattgggatgattttggcgggatgaatcaatacgtaaagtggttcgaggcaggaacgcatgatgccttttatacagatcctcgtatacaaaaagcttacaaaaattatgtgcgctatgtattagaaagaaccaatacgtacacaggtgttcaatataaggacgatccagctattatgacttgggaattagccaatgagccgcgtgtgcagtcagatccaacgggaaatatactagtcaaatgggcagatgaaatgagtacgtggatcaaatcgctggatcgtcaccatcttgttgcagtaggagatgaagggttctttcgcataccaggacatgaagactggttttatggaggcggagaaggcgtcgattgggaccgtttgacggctctctctaatatcgattatggaacctatcatctgtacccagatcactggaacaagtcagctgcttggggagtgaaatggatcgaagaccatatcacccgcgggaagtcaatcggaaaaccagttgtgttagaagagtttggcgttcaaaatcaatcagcgcgtcctgacgtatatcaaagctggctgtcagcggttgagcggctcggaggagctggcagtcaattttggattttaacaagtattcaggacgatgattcgctctatccggattatgacggtttccgcatcataaaggggagcagggagtcagcacttatcagtgaacatgcgaaaagaatgaacgaaaagaactgatggcgaatgcctgctgaataaggaacttcatttgcataaaaaaattggatatggtatagtttttatggaaatgctaacgattaccgagacaagagtggggaaacccgctcttttgtattgaacaggcaatttttgtctcgacattattcatccgttttctgctccccctgctcacataaagcagggtttttatgcagaatgattgataagagcgtttatcgaaagcacaaggaggaagagaatgagcaaaaaagtagtggatgtcgtaagcgaaatggtgcagccaattttagatggcttacagcttgaactcgttgatgttgaatttgtcaaagagggtcaaaactggttccttcgcgtgtttattgactctgataaaggtgtcgatatcgaagaatgtgccaaagtgagcgaagccttgagcgaaaagcttgatgaggcagatccgattagccaaaactactttcttgaagtgtcctctcctggagcggagcgcccattaaagaaaaaagctgattttgaaaaagcacttggaaaaaatgttttcatgaaaacatatgaaccaattgatggtgaaaaagcatttgaaggtgagcttacaagctttgatggtgagattgcaacagtgacagtgaagatcaagacaagaaagaaagagatcaatattccatacgaaaaaatagctaacgcaagattagcagtttcgttcaattaaccttttcattgatataagggggaaccataaaaatgagtagtgagttgttagatgccctgactgttcttgagaaagagaagggtattagtaaagaaattattattgaagcgatagaagctgcactcatttctgcatataagcgtaactttaatcaagcacaaaatgttcgtgttgatttaaaccgcgaaacgggaacgattcgcgtatttgcaagaaaagatgttgtagatgaagtgtatgattctcgccttgaaatctctgtagatgatgcagccaatatcaacccgaattacatggtaggtgacgtcgttgaaattgaagtcacgccaaaagacttcggacgcattgcagctcagactgcgaaacaagtggtgacgcagcgagtgagagaagcagagcgaggtgtgatctacactgagtttatcgatcgcgaggaagacattatgacgggaatcgttcagcgaattgacagtaaattcatttacgtgtcacttggcaaaatcgaagcccttcttccggtcaacgaacaaatgccaaatgaggactacaaaccacatgaccgcattaaggtgtttattacaaaagtcgaaaaaacaacaaaaggaccacaaatttatgtgtctagaacacatccaggtcttttaaagcgtttatttgaaattgaagtgccagaaatttatgatggtactgtagagcttaaatcggttgctagagaagctggggaccgttctaaaatatctgttcgtacagatgatcctgatgttgacccagttggttcttgtgttggaccaaaaggtcagcgtgtacaagcaattgtcaacgagctaaaaggcgaaaaaattgacattgtccattggtctaatgacccggttgaatttgttgccaacgcattaagtccatcaaaagtacttgatgtcattgtaaatgaagaagataaggcgacaacagttattgtccctgattatcagctgtcgttagccattggtaaaagaggtcaaaatgctcgtcttgcagcaaagctgactagctggaaaattgacattaaaagcgaaacagatgcaagggaactcggtattttcccaagaactgaagactctgaatctcttttcttagaggctgaaccagtagctgaggaatctgacgaataagaggtgatgtaaaaggtgaatagccgaaaaaaaatcccgcttagaaaatgtgtcgtgacgggagaaatgaaaccaaagaaagaactgatccgtgttgttcgatctaaagaaggtgaagtgtctgttgacgcaaccggaaaaaagaacggacgcggagcttacctttctctcgataaagaaaccattcttgcggcaaagaacaaacgcagtttacagcagcaatttcagacacagattgacgaacacatatttgaagaattactagaactagctgaaaaggtgaaaaaaccaaatgactcaatctgaatggtatcctttgcttggtctagcaaatcgagctcgtaaagtcgtgtcaggagaagatcttgtgatcaaagaaattagacatgcgcgtgctaagctggttcttcttgcagcagatgcctcatcgaacacagagaaaaaggtatctgacaaatgcaaattttataatgttccggttagaaaagttgaagaccgttccgttctcggacgttctattgggaaagaagctcgcgtagttgtcgctgtcactgaccaaggcttcgctaagaagctgataagcttgctcgattaatttatttgggggtgaacgaatggctaaagtgagagtatatgaatacgcaaaagccatagatgtttcaagtaaagatattatagcagcgcttaaggatatgaacgtggaagtgaacaaccacatggcgacgcttgaagacgacactgtgaaaaagctagacgctatctataaaaaagccaaagcaaaagagacagctaacgagaaacccgcagaacaaaaaaaacaatcatctaacaaaaacaatgatagaaagaagaatgacgtgcagaataatcaatttaataaaaacaaaaaaaacaacaaccaaaacaaaaacaaaaataaacgcggtgggaataacaaaccgcagcatcagcaagctagacctgtgaagcctaagaaagagcttcctgaaaaaattgaatttacaaattcaatgacagtcggccagttggctgaagagcttggaaaagaaacagctgaaattatcaaaaagctgatgatgcttggtgttatggcaaccattaaccaagagctggataaagatacagttgaattaatcgcttctgaatatggcgttccagtagaggaagtcattattttagaagaaactgaacttgaaaagtatgaagttgaagataaagaagaagatatgcaagtacgccctccagttgtgacgatcatgggacacgttgaccacgggaaaacaacgcttcttgacagcattcgtaagacgaaagtcgtcgaaggcgaagctggtggaatcacgcagcatatcggtgcttaccaaattgaagaaaacggcaagaaaatcacgttccttgatacacctggacacgcagcatttacaacgatgcgtgcacgtggtgctgaggtaacagatacgacaattctggtcgttgcagcagatgatggcgtgatgccgcaaacgattgaagccattaaccatgcgaaagcggcagaagtgccaatcattgtcgctgtcaacaaaattgacaaaccaacagcgaaccctgaccgtgtgatgcaggaattaacggagcatggtttagtaccagaagcttggggcggcgaaacgatcttcgttcctctatctgcaaaaacaggtgaaggcattgacgaattgatcgaaatgatccttcttgtcagcgaagttggagaactgaaagccaacccaaatcgtgcggcaaaagggactgtcatcgaggctgagcttgataaaggaagaggatctgttgcaacccttcttgttcaaactggtacacttcatgtaggtgacccaatcgttgtcggaaatacatttggccgtgtacgtgcaatggttaatgacatcggacgccgcgtgaaaacagcaggaccatctacacctgttgaaatcactggtttaaacgatgtaccgaatgcaggggatcagttcctcgtattcaaggatgaaaaaacagctcgtcaagtaggtgaggcgcgtgcttcgaaacagcttgatgaacagcgttcagacaaagcgaaattatctctagatgacctatttgagcaaatcaaacaaggtgaagtgaaagatatcaacttgatcgtgaaagcagacgtacaaggttctgctgaagcactgacggccgctcttcaaaaaattgaagtagaaggcgtaaaagtgaaaatcatccatacgggtgttggagcgattacagaatctgatattattttagcaagtgcttctaatgcgatcgtgatcggatttaacgtacgtcctgatggaaatgcgaagagcacagctgaaacagaaaacgtagatatccgcttacaccgcattatttataaagttatcgatgaaattgaagctgcgatgaaaggaatgcttgaccctgaatatgaagaaaaagtcatcggtcaagttgaagttcgtcaaacgttcaaagtttctaaaatcggtacaattgctggtggctatgtcactgaaggaaccattacaagagatagtggtatccgcttaatccgtgacggcgtcgttatatttgaaggcgaagtcgacgtattaaaacgattcaaagatgacgtgaaagaagtttcacaaggctatgaatgtggtattaccattaagaagtacaatgatatccgtgaaggtgatgtcatggaatcattcgttatgcaagaaatcgaaagaaaatgatcggttataccgaatgtgagtgcatcatctatgatgcctcctcactgaaggaaaaacgtgcggttcttcaacgtatattgacaagaacgcgccataaattcaatgtaaccatggctgaaatggattaccaggacacatggcagcgtacatcaattggaatcgccgtgatttcctcctctcgggttcaagtggaaaaggaattgcagcgtgttttaagctttattgattcttttcctgaaattgaacgaacgatcacgaaaactgagtggttttaattagaggtgataagatcatgagtatgagagcaacccgcgtgggtgagcagatgaaaaaagaattaggtgacatcctaggcagaaagctaaaagatccaagaattggctttttgactgtaaccgatgttgaagtatccggtgatttgcaaattgcgaaagtttacatttctgttctcggtgacgagaaaaaaagagaggaaaccttaaaaggccttgcaaaggctaaagggtatatccgctctgaaatcggcaatcgaattagacttcgcaaaacaccagaactgcactttgaattcgatgaatccgtagattatggaaatcgaattgaaagcctgattgctgaactaaacacaaaagatcatgaataagacgttgaaataaggataggcgatgatcgtctgtcctttttcatcgtttatgaaaggagagaacgcagatgataaatggtgttcttttattacataaagaaagaggaatgacctctcacgactgtgtgttcaaagtgagaaagatcttgcatacaaaaaaagtcggacatacaggcactctcgacccggaggtatcaggtgttctgcccatttgtatcggaagagcaacgaagattgtcgaatacttaacagataaatcgaaaacgtatgatgcagaaatcatgattggcttttctacaacaacagaagaccaaacaggtgagatcgtagaagaagaaaaggtgcaaaaacccatctcagaagaagaaattgatgctgtgctgaaacagtttcaaggaaccattgaacaaattcctcccatgttttctgctgtgaaaattggcgggaaaaaactctatgaatatgcaagagaaggcattgaaattgagcggccgagccgtgaaattacgattcaccgtatcgagcggacaacacctgctttatttgagaatggaaaggtatcatttagattcaccgttttatgctcaaaaggaacgtatgtcagaaccttagcggttgatattggaaagaaactagggtttccagcccatatgtcacatctcattcgcacagggtcaggtgattttacactagatgaatgcatcacccttgatgagctccgaaatataagcgaggaaggagcagtagatgagcaccttgtcccgatcgagcgcgcgctcaatcatttgccgaaatgggagataaatgatacattagcaagtaaagtggaaaacggtgcagtcctgccaatgcctgatgaattcgctcatttcgcagaggaagatcgtgtcgctgtctttgctccttcaggccgctgtatggcgatatatatgaagcacccgaccaaacagaatctgatgaagccggcgaagatcttatctcaggacaagcaatcttaaagaaaaggtgaccatctcgtgaagactatacatatttcacacccacatacattgaatcaaaaggatcaagacccttctgttatggctttagggtattttgacggtgttcacctcggacatcaaaaagttattgacgcagcgaaaagcattgcgagaaaagaaggattggctttagcagtcatgacctttcatccgcatccatcacatgttttgcaaaaagcacgtgaaccaaaggacttaattacaccgcttgaggataaaattgatttcatcgaacagctgggcgctgactatttatacattgtgcaattcagcgaaagctttgcagcgctgtctcctcaagagtttgtggatcaatatttggatgagctgaatgtgaagcacacagtagccggttttgattttacgtttggccgttttggtgcaggcacaatggaaacattcgatgagtacggaaaagggcgtatcacggccaccatcgttcctaagttgtccaatcaagaccgtaaagtcagctctacactcatacgttccgcattgaaaaatggggatgttgaatatgtgagtgagcttttaggaaaaccttatcagctgcgcggtattgtcattcatggagataagcgaggacggacgatcggctttccgactgcaaatgtcggtttatctgctgaatacattattccgccaacaggggtttatgcagtaagagcagaagtcaaaggcaaagtgtatgacggtgtttgtaacgttggctataaaccaaccttttatgaaaagcgccctgatcagcctgccattgaagtaaacctctttgattttaacgaagaaatatatggtgaaccgattaaattacagtggttcaaacgcattcgcagtgaacaaaaatttaacggaatccaggagttaacggctcaaatcagtcaagataaagaagaagcgattcagttttttcaagatcagctaaggcaaacaaaaaattcatagaaaaacagctctaccatttgcaaattcagcatatttttagtatgattattcctgtagctttaaaaccacttacttggcaggccgacttcaccgacggttgcgaggtagatggggctaacatgatttggaggtgaaacaggatggctattactcaagagcgtaaaactcaattaattaatgagttcaaaacacacgaatctgatactggatctccagaagttcagatcgctgtcctaacagaatcaattaacaacttgaacgagcatttacgtactcataagaaagatcaccactcacgtcgcggtcttttgaaaatggtaggtagacgtcgtaatcttcttacgtatctacgtaataaagacgtaactcgttaccgtgagttaattaacaaactaggcttacgtcgataatcgtaaaaagcgggaggattcccgcttttttatcgtataatcactaatattttatggttaaaatgttgaaagaatggcaaaaacccttctacatacacctttcacattgatatgtgaaaatcattttgttcataataagaattaactaaaatttcaagataagagaggagtttttctcagaatgggacaagagaaacatgtcttcaccatagactgggctggacgtcaactgacagttgaaactggccagcttgcaaagcaagcaaacggagcggtcctcgtacgctacggagatacagctgtgcttagctcagcaacagcttctaaagaaccaaaaccacttgattttttcccgctcactgtgaactacgaagaaagattatacgcagtaggtaaaattcctggaggcttcattaaaagagaaggccgtccaagtgaaaaagcgatccttgcgagccgcttaattgacagaccaatccgtccattatttgcagatggatttagaaacgaagtacaagtcattagtatcgtcatgagtgtggatcaagattgttcatctgaaatggctgcaatgtttggctcatctttagcattatgtgtgtctgacattccatttgagggaccaatcgccggcgttacagtaggacgagttgatggaaagctgatcatcaatccaaatgtagagcagcttgaacaaagtgacatcaaccttgtagtcgctggaacaaaagatgcgatcaacatggtcgaagctggtgctgatgaagtaccagaagaaacaatgcttgaagccatcatgtatggtcaccaagagatcaaacgcttaatcgaattccaagaggaaattgtcaaggcagtcggtaaagcaaaaatcgatattcctttatatgaagtagatcaaacgttagcagacgaagtaaaagcacttgctgaaacagacctgctgaaagcgattcaagtacatgagaagcatgcacgtgaagatgcaatcagtgctgtgaaaaaagctgtggttgagaagtttgaagaagaagatcgcgacgaagcgacgattaaacaagcgaaggatgtattaaacaagcttgtcaaaaatgaagttcgccgtctgatcactgaagagaaagtacgtccagatggacgcggtgtagatcaaatccgtccactttcttcagaagtaggacttctgccaagaacgcacggttcaggtctatttacaagaggacaaacacaggcgctcagtatttgtacattaggtgcacttggcgatgtgcaaattcttgacggtctaggcgttgaagaatcgaaacgcttcatgcaccattacaacttcccgcaattcagtgttggtgagacaggtccaatgcgtggcccaggccgccgcgaaatcgggcatggtgcgctaggtgaacgtgcattagaaccagtgatcccatctgaaaaagatttcccttatacggttcgccttgtctctgaggtattggaatcaaacggatctacttcacaagcaagtatttgcgcaagcacacttgcgatgatggatgcgggtgttccaattaaagcaccagttgcagggattgcaatggggcttgtgaaatctggtgaatactacacagtgctgacagacattcaaggaatggaagatgcacttggtgatatggactttaaagttgcaggtacatcaaaaggtgtaacagcgcttcaaatggatatcaaaatcgatggtctatcaaaagacatcttggaggaagctctccaacaagcgaaaaaaggaagaatggaaatcttagaaagcatgctgtcaacgattcctgcttctagaggagaattgtctcgttatgcaccaaaaatcttaacgatgaagatcaatcctgataaaattcgtgatgtcattggaccaagcggtaaacaaatcaataaaatcattgaagataccggtgtgaaaatcgatattgaacaagatggtacaatctttatctcttctacagaagaagacatgaaccaaaaagcgaagaaagtcattgaagatcttgtgagagaagttgaagtggggcaactttacttaggtaaagtaaaacgcattgaaaaattcggtgctttccttgaaatcttcagcggcaaagatggacttgttcatatttctgagcttgcgcttgaccgtgtaggcaaagtagaagatgtcgtgaagattggcgatgaattacttgtcaaagtcactgaaatcgataaacaaggccgtgtgaacctttctcgcaaagctgttttacgtgaagaaaaggaaaaagaagaaaaacagtcttaatgaaatgtgttagaagccaggtatccgtaccaggcttctttcttttcttgcgctaacaatagttctagcttgtttctccccatcataatttgtggtaaaggggagggacagccattgaaaaaaacgttaccattcattgtgtttgtatttttactgctcgtgtcatatcaaacgatgaagcagccggctgctgttacatatattgaatcaatgaaagagcatgctgaggttgcatctgtttcaaaagatattttatatcaagagattgaatcgaagtcttctgactatgaagtgaaggcgcaaaatgctaagattgataaagtgtggaaaaagatgcctggtttaaatggacagacagtcaatatcgatgcctcttatgaaaaaatgaaaaaacaagggtcatttgatgaaaagctgcttgttttcaatgaaacaaaaccttctattcatttacacgaacttggtgctgagcccatttacaagggacatccagataaaaaaatgaatgctttcctcatcaacgtggcttggggtgacgagcatttaatcaagatgttaaagacactggaaaagcatcaggtcaaggcgacctttttcttagagggcaaatgggtgaaaaaaagcacggatcttgctaaaaaaatcgtggcagatggtcatgaaattggaaaccattcatacaatcacccggatatgcgcacactgacaagagaacgagcattagagcaaattaccaaaacgaatcgtcaaattgaagaatcccttggaaaaaaaccgaagtggttcgcccctcctagcggcagctttaaagaagaaacagtgaaactcgctgctgaagaaggaatggaaaccattatgtggacggtagacaccattgactggcaaaaaccgtcaccagacatattacaaaaacgggtgcttgggaaaattcacaatggggcgatgatattaatgcatccaacagattcgacggcgaaaagtcttgacgcacttatcactcaaattaaggaaagaggatatgaattaggaacggtttcagacctcctaagtgaaaaaagacatccgtgatccgatctgtttgttgaataggaggagcaaaacttggtcaaaacgtatacatgccaaaacggagtaagaattgtacttgaaaacaatcccactgtaagatctgtcgcaattggcgtctggattggaactggttctagacatgagacaccagaaattaatggaatctcacactttctggagcatatgttctttaaagggacaaagacgagatctgcacgtgatatcgcagaatcctttgaccgcattggtggtcaagtgaatgcctttacgtcaaaagaatacacttgctactatgcaaaggtgcttgattcacatgctggctacgccctcgatgtattaagcgacatgttcttccactccgcttttgatgaagaagagctgaaaaaagaaaaaaatgtagtctatgaagaaatcaaaatgtatgaggatacacctgatgatatcgttcatgatctgttgagcaaagcgatttatggtgatcattctttaggcttcccgattttaggaacagaagaaacactttctacttttaacggagactctcttagagcttatatggatgaattctacacgccggaccgcgttgtgatctctgttgcagggaatgtggatgacaccttcattcgagaggttgaaaagttgttcggttcgtatgaaacgaaagggaaaaaacagcctttagaagcgccgcaatttcactatgacaagctcacacgcaaaaaggaaacagagcaagcgcatctatgcatgggctttaatggcctcccagctggagataaaggcatctatgacttaatcgtcttaaacaatgttcttggcggaagcatgagcagccgcttgttccaggatgtaagagaagacaaaggactcgcttattccgttttcagctatcacagttcatttgcagataacggcatgctgacgatttatggcgggactggagcgaagcagttaaacctgctctctgaaaccatcttacaaacattagacgtcttaaaacgtgagggaatcacgcaaaaagagcttgaaaactctaaggagcaaatgaaagggaacctcatgctcagccttgaaagcacaaacagcaagatgagccgaaacggtaaaaatgaactgctccttggcaaacatcgtacactcgatgaaattattgacgaaatcaaccacgtcacattagacggcgtgaataacttatcaaaacgaatctttacagaagattatgcgctctcgcttattagtccgacgggtgatcagccatcataatgtaaacaacacggcaggcttctaagaggtctgccgttttattgtatataaagaagaagggagcactgctttcatggaacatgaaaaactgaaacgcctctctccgcttctgacacaagccatctccttccagccgatgacatctggcttttcaggaaaccgtacttatctcgtcacaacatcctctagtgaaaagctagtgctcaagctatcaaacctcaaaacgtattccagctttaaaagaaaagcgtcagttcagcgaaagttaaaagatcgagggcttctatgttctgaagtgatggagattggaatgaatgctgaacttaactgtacctatcgtattttctccttgattgaaggagagaatgctagagcatccatccatctgctcacaaatgaagagcagtatgaaatcgggaggcgggcaggcagagagctaagtttcatgcatacatgtcccgcaccttctcatgtcgcaccgtgggatgagagggtcatggcgaaacatgaacggtatgtacatgcctatcaatcaagtggagtaacttttgctcaagatcaattcgtattagattttatcaaatcacatgttgatgcggtaaaggcgagaccgaaccagttccagcatgatgattttcatttagggaatatcatcattcaaggaggtgagtatgccggcgtgattgattttgatcaatctgactggggtgacccggttcatgacttttataaattgtccttatttagtcgagaaagcagtattccgttttcagcagggcaactggattactatgtaagtacgcaggccacagacgatttttggcttcttttttccatctatacagcaatgagctgcttttcttctattgtatggacgctttcttatgaccctaaacatgtaaaagaaatggtgaaccgagtggagagaatgctggcagaccatgatcgctttcatctactgaaaccagcttggtattcaaattggcatcattcataacttgaaaaagcgggacggtctatttcttcttgtggctgcatatatgatacggaagggaagtgatgcgattttgaggctaagtgagctgtcaggaaaagagatcgtcgatatcaaaagagcggagcggcttggcgtgcttggacaaaccgaccttgaaatcaatgaactggacggtcaaataacagcactcatcataccttcggtgaagtggtttggctttcgaaagcaaggaaatgacatccgcgtcccgtggaatcacattcaaaaaataggatcagatatgatcatactcgatgtgcctgaagcacttcagccacccggagaaaaagagcatccatcataaatgggtgctctttttcttttctctctccgatttgttcacaggctgaatcctctcctcatatgctagaagggagattcagaaaatattacagacttttttaaataaagaaggtgaacggtcagtatgttgagcggtttaacggttgcggtgatcgggggagatgcaaggcagcttgaaattattcgcaagctgtcacagcagcatgccaaagtgtttttggttggatttgatcagctggatcacggatttattggggctgaaaagctaaaaatgtcagaacttccattcgaacaggtagacagtatgatcctgccagtatcaggggcaacggatgaaggtgttgtcgcgacagttttctcaaatgaacaggttttgctggaagcaacatatttagaaagaacccctgcccattgtaccttgtactcaggtatttctaatacgtacttagacaatctggcaaagcaggtgaaccgaaaacttgtgaagctgtttgagcgagatgatattgccatatataactctattccaacagttgaagggattatcatgatggccattcagcaaacggattatacgattcatggatcacgtgttgctgtcctcgggctcggaagaacaggactcaccattgcccgcacatttcgggcactcggtgcggacgtaaaagtaggggcagcagatacagctcatttagcgcgggcttttgaaatgggaattgatccattttcaatggaccggttaaaagaagaagtaacggatgtagatatcatcatcaataccattccaagccttgtattagattcatctgtcatcgtcagtatgacaccaaagacactcattttggatatcgcctcccgcccagggggaacagactttgactttgcacaaaaacacggagtgaaggcgcttcttgcacctggactcccgggaattgttgcaccaaagacagcagggcaaatcattgcaaaagtgctttctgggctcttatgtgaacttgcagaggaaaaaagggggatggaatcatgacaacattaaaagggaaaagaatcggctttggcttaactggttcccactgtacgtacgaagctgtttatccgcaaatcgaagcacttgtaaaagaaggagcagaagtgcgtccagtggtgtcatatacagtccagaacacaaatacaagattcggagatggggcggactggattgagcggattgagaagctgactggttttaaggcgattgactcaatcgtgaaagcagagccgctcggacctaagctgccacttgattgtatggtcattgctccattaacagggaactcgatggcgaaattcgcaaatgccatgacagacagccctgttttaatggctgcaaaagcaaccattcgaaatcatcgtcctgtcgttttaggaatttcaacaaatgatgcgctaggcttaaatggtacaaatctgatgaggctgatgtcgacaaagaatattttctttattccatttggccaagatgatccatttaaaaaaccgacctccatggtcgcaaacatggatttgctttctcaaacagtagaagaggcgctccagcatagacaaattcagccgattttaattggagcaaacgaataatagattcactagaaaatcatgaaagattcaaaaaagatgcttcaagccttgcttttctatggtaaaataaaatgtaaaaagtcataggatggccatccgaaagaaaagaatcatggatgggtcggaaggagttttactgatgggaagaggattgcatgtagctgtagttggagcgactggagctgtcggtcaacaaatgttaaaaacactagctgacagagattttgaaatggatacactgactctactatcctcaaaacgttctgctggaacaaaagtgacattcagaggtcaagagtataccgttcaggaagcaacacctgaaagctttgaaggagtgaacattgcattattcagtgctggaggaaatgtttccaaggcgctagctcctgaagcagtcaaacgaggtgcgattgttgtagacaacacaagtgcttttcgtatggacgaaaacatccctcttgtcgtaccagaggtaaacgaaaaagacttgcatgaccatcaaggaatcattgcaaaccctaactgttcaacgattcaaatggtagcggcattagaaccgcttcgtcaggcgtatggcatgaaaaaagtcatcgtgtccacttaccaagccgtatcaggtgcaggacatgaagccattgacgaactatacagccaatcacaagccattttaaataaagaagatgtaaagccggaagtcatgccttatcaaattgcatttaatgcgattccgcaaattgataaattccaagacaatggctatacatttgaagaaatgaaaatgatcaacgaaacgaaaaaaattatgcatatgccagagctagaagtagcggcaacatgtgtgagacttccaattgaaacaggacattcagaatctgtctacgtcgaactagaatcaaatgacgcaacagttgacgacattaagtcaattcttaaagatgcaccaggcattacactgcaagatgatccgtctcagcaaatttatccaatgcctgcagatgctgttggaaaaaacgacgtatttgtcggccgcattcggaaagatttggaccgtccaaacgggttccatatgtggattgtatctgataacctgctaaaaggcgctgcatggaactcagttcaaattgcagaaagcttaaaagcattaaaattagtttaacattcaatggatgatgaggacgaacagaagagagttaggcatctttcgcctgctctcttctgttacgtcagaatgaacttggagtgaaaacagtgaaaataattgtccgaaaatttggcggtacatctgtcaaagatgatcaaggtagaaaaagggcacttgcacatatcttatcggcaaaagagaaaggctataagtcggttgtcgtcgtttccgcaatgggacgaaaaggcgacccttatgcgacagatacgctgcttggtctgctttatggcagcgcgcagcatatgacaaatcgagaaaaagacttgctcgtttcctgcggagagaatatttcagctgttgtgttttcaagtatgctgaatgaaaacgggctaaaggctgtagcaatgacaggcgcacaggcgggctttgtgacagataaggagcatacgagtgcgaaaattattgatatgaagtgtgaacgtctcgaggcggcactgtctgaacatgatgttgtcgttgttgctgggttccaaggagctgcgaaaaatggggacgtgaccacaatcggacgaggcggcagtgatacgtccgcagctgctttaggtgctgcattacaggcagacttcattgatatttttacagatgtagaaggcgtcatgacagcagatccccgcattgttgaaaatgcaaagccgctcagagtcgtgacatatacggaaatttgcaaccttgcatatcaaggggcgaaagtcattcacccgagagctgtcgaaattgcgatgcaagcaaaagtaccaatgagggtccgttcaacatactctgatgatgagggcacactcgtcacgtcacactactcagataaaatgagccatgatgtgtacgaccgcctcattacgggtattgcacatgtcaatgatgtgacgcaaatcaaggtcccggcaaaagaagggcagtacagcgtccaaacagaggtcttcaaggctatggctaacgcacaaatcagtgtcgacttcttcaacattacaccgagtgagattgtgtatacagtgacaggtgcaatgactgaaaaggcaacatcgatcctaaaagatcttggctatacgccaattgtgacaacaaattgtgcaaaagtatcagctgttggcgcaggcatcatgggtgtaccaggtgtcacatctaaaattgtatcggctctatccgagcaaaacattccgattttacaatcggctgacagccatacgaccatttgggtgctagtgaacgaagaaaacatgagagcggctgtcaatgccctgcacgaagtgtttgaactttcaagataaatgtgattgaatcatgatgaggtgaaaaaaatgaatttcggaaatatcgcaacagctatgattacaccttttgataaaaagggcaacattgatttccaaaagctatcaattctcattgattacttattaaaaaacggcagtgactctttagtcgttgcagggacaacaggcgaatcgccaactttatcgactgaagaaaaagtcgctctttttcagcaatcggtgaaattagcaaatggtcgttgtaaaatcattgcaggaacaggcagtaataatacaaatgcgtctatcaaactaacgaaaaaagcagaagaagcgggcgttgatgcagtgatgcttgtcgtaccttactacaacaagccatcacaggaaggcatgtatgcacactttaaagccattgccgagtctacatctcttcctgtcatgctttacaatgtaccagggagaacggttgcgtcattagccccagaaacaaccattaaacttgcgcaaatacctaacattgtcgcgatcaaagaagcaagcggtgatcttgatgccatgacaaaaatcattgcagagacaccagaagatttcgatgtatattcaggtgacgacagcttaacacttccagctgtatctgttggtgcaaaaggagtggtctctgtggcgtctcatatcgtagggcttgatatgcagcaaatgctgaaaagctatgcttcaggtcaaacggccaatgccgcattgatccatcaaaagctgctcccaatcatgaaacagcttttcacagcgccaaatccaacgcctgtcaaaacagctcttcagctgaaaggactagatgtcggatctgttcgtcttccgcttttacctttgtcagaagaagagagactggatttaagcagcgtcttaaacagctgatcaaaacaaaagatttcgtaagcggtcattctcagatgtccctgagtatgaccgttttttatacataaacactttcttaaaatgtgacttcatcttgttttctaaaattagattcagttataatagcattaagcgatgatggacgggcttgagactaggaggataagaattttgaaaaagaaaaatacagagaacgtaagaattattgcactgggaggcgttggagaaatcgggaaaaacctatatgtcattgaaattgattccgacatatatgtggtagatgcaggcttgatgcatccagaaaacgaaatgctaggcattgacgtcgttattcctgatatctcttatttaacagaacgtgctgatcgggtgaaagcaatttttcttacccacggacatgatgaagcaatcggaggcgtattccattgcttaagcaaattgtctgtaccagtttacggaacgaagctgacccttgcgttacttcgagaaaaattaaagcagtatggcttcaatcaaaaagctgatttacgtgaggtacatgcgaaatcagtcattacgtttgaaacaacaaaggtatcattctttagaacgaatcacagcatccctgattcagttgggatcagcttcaaaacctctcttggttcaatcgtatgcacaggtgattttaaatttgatcaaaccccagcgcttaaccaagcctgtgacatcggagagattgcgaaaattggaaacaatggcgttttagcactactttcagacagtgccaatgctgaaaaaccaggttatacaccttctgaggcgctcgtccaagacgaaatctcaaatgcgatgtacaatgctgaaaatcgagtaattgtcgctgtatcttcatcgaacattaaccgcgtgcagcagatcattaatgcagcgaatcaaaatggccgtaagcttgccgtagcagggaagaatatgatgacgattcttcagctggcgatcaaacttggttatgtcacagcagacgaagaattatttgtaccagttcaagaagtgaagaaaatggcgaaaaacgatgtggtcgtcctcacagctggaagccacggagagcctcttgctgctttaacaaaaatggcaaaacaaaatcacaaacagcttcatattgaaaaagatgacactgttgtgattgcatctacacctcttccaggacaagaactcacatattcaaaaacagtggatttcctcacaagaagcggcgcacaagtcatttttgcgcaaaaacgtgtgcatgtctctggacatggctgccaagaagagttaaagctgatgctgaacttactaaagccaaagtatttaattccggtgaatggtgaatatcgtatgcaaaaagcacattctcgtattgctgaagaagtgggaatgaaacgaagtgacattttcttgattgataaaggggatgttgtggagtttagaggacagaacgtaaaaatcggtgaaaaagttcaccaaggcaatattttgatcgatggtcttggcgttggtgatatcgggaacattgtgttacgcgatagacgcctattgtctcaagatggtatcttaattgtcgttattacgcttgataaacaaaagaaacaattaatttctggacctgaaatcatcacaagaggatttgtgtatgtcagagaatccgaagagctgattgtaaaagcgacagaaatggtcaaaggaattgtcaaagagcaaacggaaaactcaattgttgaatggtcaacattgaaacaatccatgcgcgacgtacttaatcaattcctatatgaaaaaacaaaacgtaagccgatgatcattccaattattatggaagtgtgatgagaaagcccaaggagcataagctctttgggcttttttgatgtggcgctaggaatgcggattgaatacggccttcttgttcataatagaaggagagtttgaggaaaggatggagacaaatggacgaaaagaatgaacagcagcctgagcgaaagccagaagaaaaagacagcattatgagcaaaatacagcagcttggtgaaacagccataccacagctgccgcaagatacaaatatacattgccttaccattattggacaaattgaaggccacatgcagcttccgccacaaaataaaacaaccaaatacgaacatgtcattccgcaaatcgtcgcagttgagcaaaacccgaaaattgaaggtcttttgatcatcttaaatacagtaggcggcgatgttgaagcgggactagcgattgcagaaatgcttgcatctttatcgaaaccgactgtatcgattgtacttggcggcggccactctattggtgtcccgattgctgtatcgtgtgactattcctatattgcagaaacagccacgatgaccattcatcctgtgcgtttaactggtctagtgattggtgtcccgcaaacctttgaatacttagataaaatgcaggaaagagtcattaactttgtaacaagccactccaatattacagaagagaagtttaaagagctcatgttctcaaaaggcaatttgacaagagacattggaacaaatgttgttggtcatgaggcagcagaatacggactcatgaatgaagtaggcggcgtaggacaagcgattaaaaagttgaacgaactgattggagacagggcatctcaaaatgaggggctgatccaatgattttatatacacctatgccatatgaagccatttacgcggaggaacaaggagatcgcaaacttcaacaggtaaacatccaaggcgtgccagttatggttgaaatgaaagaggatgaagcagaaattgttcaagtcatgagtaccaatccaatggactttctgaatcaagagcttgcaccaggcaagcgattgaagttacaattaggcaccaatcaaaccgactcatatgaatgattctatgctataataaagggaaaacttacaacaagatgcagccaaaaccaggctgctttctttctgatctttcggtaggttatattttctttcgtagtaaggtgatgagtatggctaaaaagagaaaacggaaaacgagaaaaaaacaaaataaacagctaaaactgaaatatgaattaaatgggttagtctgtattgccatagcgatcattgccattttacagctaggcgtcgttggacaaaccttcgtacatttattccgattctttgcaggtgaatggttcattctctgccttatcggattatttctttttggcgtgaccatcttctggaaaaaacaaatcccagatatgttgacaaggagaaaagcagggctatactgcatcattgcgagtatcttgcttttgtctcatgtgaagctctttcagcacctctcatctgcgggcgcgataggctctcaaagtgtgatgagaaatacatttgagcttttcttgatggacatgaaaggtgagactgggtcgcctgatttaggaggcggcatgatcggtgccgtattatttgctgcttcttatttcttatttgcacaagcaggctctcaaattatggcaatcgttctgatgctgattggaattgtgctgattacaaatcgttctcttcaagaaatggtgaaaaaagtgacactgcctgtctcacaatttatggtgaagcagtggaaagcgtttgttgaagatatgaaaggaatcaggcaggcgaaaaagagcgcgccccctcaaaaaacaggtgaaaagaaaaaacggtctcgtattcagaaagaggacgatgatgatcagatcttgatcgaagaggaaacgccggtttctgacaatagccagccgattatctcaagctttgctgacagagatgacattctcaccccgctcgttcaaaaagagcaggtggcaaaagagacagagcctcttcaagagtctgtgcaaaatgcaccggttccatcagattctgctgatgaaccaaaagaggcgccgccgatgacatttactgaacttgaaaacaaagattacgaattgccgtcacttgatattttggcagagccgcagcactcagggcagcaaacagacaagaaaaatatatacgaaaatgcaagaaagcttgaaaaaacgtttcaaagctttggtgtaaaagcaaaagttacacaggtccacttaggaccggcggtcaccaaatatgaagtctatccagatgtcggcgtgaaggtaagtaagatcgtcaatctaagtgatgacttagcccttgctctcgcagcaaaagacattcggattgaggcgccgattcctggtaaatcagccatcggtattgaggttcctaatgcagaaatcgcgatggtttctttaaaagaggtattagaatcaaagcaaaatgaccgtccaaacgccaagctgctgattggactgggccgaaatatttctggtgaagctgtgctggctgaaatgaacaaaatgccgcatttacttgtagcaggctcgactggaagcggaaaaagtgtgtgcatcaatggtattatcacaagtattctcatgagagcgaaacctcatgaagtgaaaatgatgatgattgatccgaaaatggttgaactaaatgtgtataatggcattccgcatttgctcgctcccgttgtaacggaccctaagaaagcctcccaggcacttaaaaaagtagtcagcgaaatggagcgccgctatgaattattttctcatacggggacaagaaatattgaaggatacaatgattacattaaacgaatgaatcaatcagaagaggccaaacagccagaacttccttatattgtcgtcattgtagacgagcttgcagatttaatgatggtcgcttcctctgatgtagaagattccattacaagactttcgcaaatggctcgtgctgccgggattcatttaattattgctacacaaagaccttctgtcgatgtcattacaggtgtcattaaagccaacatcccatctcgcatcgcctttagcgtgtcctcgcaaacagattcaaggacgatccttgatatgggtggcgcagaaaaactgctgggcagaggggatatgctgtttctaccggtaggtgcaaacaaaccggttcgtgtgcaaggcgcctttttatcagatgaagaagtggagcatgtcgttgatcatgtgatcacccagcaaaaagcacaatatcaagaagaaatgattccaactgaagaaacgcaggatcagcttacagctgtggatgacgatttatatgatgaagcagtggaactcatcatcggcatgcagacggcttctgtctctatgcttcaaagaagattccgcatcggctatacccgagcggcccgcctgattgacgcaatggaagagcgaggcgttgtcggcccttatgaaggaagtaaaccgagagaagtcctgctctcaaaagaacaatatgacgagctctcttcataaatcgaagagagctttcctaaaaaagaagtaaacgatagtatgattatgttaactggaagtcagactatttatttatttgcaaaaacatgatatagttgtgttcaacttatctcggaatagagatttctcatcttatcatttgcattgattagacggagggaaaacatgtcgaccaaaacagacaatcgccatttatatttgaaagtgattgaccgtattaaagaagatatacaaacaggcgtatatgcagaaaaagaaaagctgccttctgagtttgagctctcaaagcttttaggcgtgagcagagcgacactgcgtgaagcccttcgtgtattagaagaagagaagtatttaattagaaggcatggtgtgggaacgttcgtcaactctagaccactcttttcaacaggcatagaacagctggcaagtgtcacgaaaatgatcgagcaggtcaatatgacgcctggtaccatctttttatcctcgcaagaaggggagccaacagagaatgatgtgattcgttttcagtgtgatgaatctgatgagattttttcaatggaacgcgttcgaacggcagatggacagccagtggtatattgtttagataaaattccggtcaagcatcttcccgcttcttttacacatgaagaagagtctctttttgagctgtttggaagagaaccacacagcgggattaaatatgcagttgctgacatcgaaccaatcggctaccacgatcaggtttcaccgatactcgaatgtgaccctgaaacagcattattattactgaaacaaatgcactatgatcaggatgatcagccggtcttatactcgcttaattattttcgagcggataaattcagctttcatgtgatacgtaaacgattttaacaagcagtcgcttccagaagcggttgctttttgtttgcccatacataatacccgtaaaacttgccacactaatacgtaacagtatatagaattgggtgaatgatgttgggcgagaaaacagtcagtaaaaagaatattattgcattatcatcagtgcctctaatcatgacacttgggaactcgatgttaatacctgtattgccagagatagaaaagacactctccatcacttcctttcaagtctccctcattattacggtatactctgttgtagcgatcttatgtattccaatcgccggctatttatcggaccgaatcgggcgtaaaaaggtactcctgccgtgtctgttaatcgcaggtcttggtggggctgtggcagcagttgcctcaacgatcatgaaagaaccctacatgtggattctatttggaagggtccttcaaggtgttggctcagccggggcagcacctgtcgtgatgccgtttataggagatttgtttcatgatgatgaagaagtaagtgcgggacttggcgccatcgaaacctctaacacagctggaaaggtattaagcccgattattggggcgcttctggcttcatggttttggtttgtgccgttttggtttattccgttcttttcaatcatcagctttctcatggtactgttcatggtagagtccgcgaaaaaagaggaggacccgcctacattcaaagaatttttaaaatcaacaaagaccatttttaagcatgagggacgctggctttatgccatttttgcaattggcggttttattatgtttcttctttttggtgtgcttttttacttatctgataacctagaggcagcttatcaaattaagggtgtcaaaaaagggctcctgcttagtatcccgctcctttttctatccatcagttcatacattgctgggaaaacgattggaaaagaaaaagggaaaatgagaatctttataatcgtaggcatggccttgttatcactttcctatatgtttttatggtggaatcacagcttttacgtattgtttatctgtttaagcgttggcggtgttggcatcggtattgtactgcctgcacttgatgccctgattacagaaggaatcgaaaaagagcagtgcggaaccattacgtcattttacagcagtatgcgttttatcggtgtcgctttaggacctccgatttacgcctatctcatggataaaggggactccatcgtttttattctctcgaccatttgcagtcttatttcactatttttggtcctcttcttcatccagccagatgaaaaggatgaaagtgaacaattaaaaacggtttaatctagaaaaaagacggtattttgccatcttttttcttttttataaattgacatgtaaaattttgatagttaaactaatgtatagtaatatcttttaaattatcccaaataggaggtgttcaaaaacattcattttctgtctttcttcaggcagaaattgagctcgcgtgctgatgatgaatatgtgtttcttcaacacgaaaagacaattgaataggtcatcctgccattagcacgttgaaggagacgcagtcagcacttcagacacgctcaaatacagcaaattgattgatgaactagaaggagcttgaagcagctatgttgcaaataattaaagcaagatggattgtattagtggtgtggatgataacagctgtgattctgtttattactgcgcctaatttagaggaattaacaagagaaaaagggcaattaaaggttccggaggggacaccaacagctgaggcacttcacttattggataagctatcagatcataacgggaaaaaagatacgggtgtcattgtattctccgaacaacatctgttccctgagaaagagcaggaattaaaaaaggctttatctgcactcatgactcatgccccagacctccacattgacggaattacttcgtattttcatgtagatccggacattcaaaaacaacttttatcaaaggataaaagtacacttcttgttccattcaaattcgaccactacgaaacaaaagctgtgaagattaaagaacaaattgaggaagttttaaagccctatcatgtctcatatgaaatgacgggtcaaaaatttgtggattcagatgtcattaaaagctctcaacaaggtctgaagaaaactgaacttattacgatgatttttattttctttattttaatcattgttttcagatcgattttggcacctgttgttccgctcattacgatcggcatttcttatgccgtcagccggtgtattgtggcttttctagtagaatatatgcaatttcctctatctaattttactcagatttttatggtagctattatgttcggtataggaacagattattgtattttgctgttaagccgttttaaagaagagatcggtcaaggtcgtgatgtcaaagagtcgattatcatcacatataaatgtgcagggaaaacggtctttttcagtggcttagccgtgttagtcggcttctcaagcattgggtttgccaaatttcaattgtatcaatcagctgttagtgttgctgttggagttggcatactgctgattgccctagtcaccatcgttcccttttttatgtctgttttcggacaatcccttttttggccatctaaaagagaaaacattcgccacccgcaaagtaaaatgtgggaatgggctgggcgtttttcatttaaaaggccgctgatcagtttaggtttagttgcactaattactgtgcctcctattttgatgtacgacggaactctttcttataacagcttaaatgagattgggacaaagtatgaatcagtgtctgcatttaatacgatatcagagcaatttggctttggggaagcgctgcccctgaatgtacttgttgaaagtgacaataagttagataaccaagaaaagattgtcatgattgaaaaactgacccgtaaattaaatgacattgacgaagtaaaaacagtccgcagtgtcactaggcctgttggagacgggctaagtcagctttacgtcacctctcaagcaaaagagctgggaggagagcttggcaaaggccacgaaggaatcgggaaaatttcagatggcctgaccgaaacaaatcttgcccttctcaaacaaaaaccaaaaattcaagaatccgctaaaggcattgaccagctgattgatggaacaaaagcgatcaaaagcggaattggagaagtaagggagtccttgatctctttagaagatggggtaaggcgcagtaaagatggcgtcgggaccatccgaagtaaaatcaaagaagcgaaaaaggaattagagcaagaatatcgcagcagtgaagcgatgattcaagagcttaagcgaatggtgagtacgctggaacgtcatgcgaaatccaatcagcagctgatgaccaccattaaaaaagtaaaaaattcctatgaaaatgtatcgtttgaagcacttgaaaaacggcttccagaagtaaaagatatggatgaatataaagaaatcaagaaagtattcaaagacacaaaagaaatgcttgatcaagctggggaccaaatgagtgtgtatgaagaggaagcctctcactttaaacaaaagatcaaaaaagcaaatcaagtaattcaaaccttatcaagcaagcaaaaagacgtaaaacgccaagtgcaagcactcatggacgggctcgatcaaatttatgacggtcttgaacaaacaaatgaaggacaaaaacaattgattaaagaaatgcctaaaattgaagatggcgcagatcaactgacaggcggacaaaaagccatcaaaaaaggatttaatcagctctcatcaaaacttacattattaacagatggattaggtgaaagtattgaagggctcgagcaggtcaaaagcggcttcaccgaggcggacggctatttaaagcagcttcagcaagcgccagatgaagaaataacgggctggtttattccagaagaagtgctgaaacgccatgaatttaagcaaatctttaaaacgtatatgtctccagatcgtaaattaacaaccttagaagttattttaaatgtgaatccatacagcaatgaagcgatgaaaggcgttgccaaaattgaggacacccttgatcaatatttacctgtcagcgggttaaagaatgcaaattacggtgtgtctggtatctcaagtttaaatgtagatttaaaagaaacatctgacggtgactttattagaacggtcattttcatgttagttggcatctttatcattttaattatattattacggtcaatcgtcatgccgatatacttaacactttcactcattttaacgtattttacttccgtcggattaacagaatggatcttcaaaacattttttggctacgacggtcttagctgggctgtcccatttttcagctttgtcattcttgtcacccttggcattgattattcgatcttcctaatggatcgctttaatgaatggaagggagagcatgtgcaagcatcaatgatatcagcgatgagaaatatgggttctgtcattatttcagcagtcgcgatattagcggggaccttcgccgccatgctgccgtctggtgtattatcacttgttgaaattgcaacggtcatactcattggacttttattatatgcgtttgttgtattacctctctttattccggtcatggttcgtattttcggaaaatggaattggtggccttttagaatgaaataacgaccggcgcctctgctcatagcagaggcgtttttatttcctatcctttcctctgattgatataatgtctattaaatggctgtttcacgtatatatcagctatgttctaatacataataaataggatgaacaaaggaggtttctcatgacgtacttacaagagaagacactagacacacctggtcttcatactcatattgtcaaaacagaaaaatttaaaacggtcacaatcctttttaaaatgcttgcgcctctatcgaaagatgacgtcaccatgcgttcacttttcccgcatgtgctgttaagaggaacagaaaaaatgccgaaaacaggagaattgcgtgcttattttgatgagctttatggtgctactgtttcagcagacatggcgaaaaaaggggagaatcacatcattaccttccgcctggaaatggcgaatgaaaaatatttaaaggatcaaacacctttactagaaaaaggaattgctttactatctgatctactattccatccgtatgttgaagatggagcgtttagtcaattatatgtagatcaagaaaaacgtactttaaaacagcgaattcaagcagtgtatgatgataaaatgcgttactcgaacttaaggcttgtgcaggaaatgtgcaaaggtgaaccatatgcactgcacgtcaatggagaaatggaagatatcgaaacgatcacagctcactcgctttttgaagcttatgagcatgcgcttcaatcgaatcagcttgatctttatgttgtgggagatgttgacgaacaagacatcagccgaatggtctctcaatacttcaaaacaagtgatagagaaccggtcaaacaacacgctgactcaacaagaacgcaaaaagaagcaaaagaagtcattgatgaagaggacgtgaagcaaggcaagctgaatatcggctttcgcacgcatacgacgattgcagatgaagattatccggcgctgcatttgtttaatggcatatttggcggcttctcgcattcgaagctattcatcaatgttcgggaaaaagcaagtcttgcgtactacgctgtgtctagacttgagagctttaaaggcttgatgatggtcatgtcaggaattgaagtcggcaactaccagcaggcagtagacattattaaagaacaatttgaagcgatgcaaaagggtgatttttcagatgaagcgattgaccaaacaaaggctgtcgtcaaaaatcagctgcttgaaacgatcgatacatcttatgggacagcagaatacctgtatcagcatgccgttgtgccaacaggagaaacgcttgattcctttttacaagcacttgaccgagtgacaaaagaggacatcatcaaagtgggtcagaaaatcgaatgggatacgacctattttcttaaaggaacggagggtgcttcatgacagtgaaaacaattcaattcgaccagctgcaagaaacggtctatcacgaaaaaatggagagcggacttgacgtttatgtgctcccaaagcaagggtttaacaaaacctatgcgacttttacaaccaaatatggctctgtcgataacgaatttgtgccgcttggcaaagaagacatgattcgagtgcctgacggaattgcccatttcttagagcataaactgtttgaaaaagaagatggagacgtatttcatacatttagcaaacaaggagcatccgcaaatgcttttacgacatttacgagaacagcttacttattctcaagcacctcaaatgtcgaacaaaatcttgagacgctcattgattttgttcaagagccttattttactgaaaaaacggtcgaaaaagaaaagggcatcattggtcaagagattaacatgtatgatgataatccggactggcgtttattcttcggtctgattgaaaatctatatcaagagcaccctgtgagaattgatatagctggaacagtagaaagcattgctccgattacaaaagatcatttgtatgaatgctatgaaacgttctatcacccgagcaatatgcttctatttgttgtcggtcccgttgacccgaagcaaatattagaccaagttcgaacgaatcaggcgaaaaaaccatttacagaccagccagatatcaaacgaaaagacatcaatgagcctgaaggtgtgtaccgaaaagaatacgaacttccaatgaacgtacaaggctcgaaatgtatgttcggattaaaaacaaagaatcctcataaaaaaggaaatgagctgctaaaacatgagctcggaatgaatctcattttagagacgctgtttggtaaaagctctttacaatatgaacaaatgtatgaaaaaggcttaattgatgagaccttcagctacgattatacggaagaaggcggctttggtttcacgtcagttggcggagatacaaatgatcctgatcaactggcaaaagtattaaaagaaacacttcttcaagcaaagaacttgatgtcagaagagaaaattgagctcgcgcgcaagaagaaaatcggcagctttttaaaagccatgaactctccagaatacattgcgaaccaattcactcgatatgcatttttagacatgagcttatttgatgtcgtgaccatgctggaacaaatccaattagccgacattcagcaaattttagaggaagaaattgatgaagaacggatgtccgttttcaaagtcgtcccgaaaacaaaataaataaaaaaagacaaacttagatcaaatgagtttgtcttttttatgtctaagtgataaaagcatgttattagtgaggattttcattgacaatcaatttgttcgttagttaaactctttaatagttaaacacttaaactaaaaaggagcagcgtatggaacaaaataaaattgcacagctcattcagagatatgcagacgtctatctcatgatggaaaaaaaggtatcgggtatgatcacggaaaagcttgataaagagctgacgcttgatcagtattactcgcttcgatacatcaatttacatcctggatgtacatcaactgaccttgcaaatgtatgtaatgtgaacaaaagtgctgtaacctccatgacaaatcgtctttttacgaaaaactatattgtccgtgagcacgatcaagccgatcgaagaaatgttcacctgtacgttacgccagagggcaaagatgtggtcagccgaatggaaaagcagcttcaggatctagttcgatcttattttgaaaagctggaagaaaaagaaatggaatcatttattcaaacatatgaaaagatctatcaagtgatcatcgaagaggaggcacaaagtactaatgagagcaatcataaagggtagatggctgatcacgattctatggatcgtattagcggcagtgttactcatcaccgctcctaatatggcgcaattaacaaaagaaaaagggcaaatttcagtaccagacggctatccgtcctcatatgcaaatcagttattaaagaaaatgtctgaaaacggtgatacagaaaaatcaatcgtcattgtctttcaagaaaagaacatcgtcaaagaaagagaaacatctttaaaaaaggcaatggagattttagaaaaggatcatgatctacatgtagaagatatcacttcttattttgacgccaacaaagatatcaaaaaacagatgctctctaaagatcgcacgacgctccttgttccagttacatatgactcaaacaaaatcaaagcttccgattttaaagaaaaagtcaatgaaaagctgaagagcttaaacctaacatttgaaatgacaggacagccgttaattgatgatgatgtgatcacaagctcgcaagaaggtctgaagaaaacagagttcattacgattgggtttattctcatcgttcttgtccttgtctttagatcagctgtggcgcctttcgtaccattagtcgcagtagctctgtcttacttggtgagtcaatccatcgtggcttatttagttaaatatctcgacttcccgctctcgacctttacccaaattttcatggtcgcgatcatgtttggaataggaacggactactgcattctgcttctcagtcgctttaaagaagagatcgcacacggtaaagataaaattgaggcgattctgattacgtataaaacagcaggaaagaccgttttattcagcggaattgctgtgctaatcggttttacctgtataggcctggcgcaattccagctctataaatcagctgttgcagtagcagttggtgtcgctgtgctgattgtggcgcttctcacgattgttccgttctttatggcggttttaggaaaagtgttattttggccgattaaaggtgatattgctcatccgcagtcaaaaatgtgggaaacagcaggacgcttttcatttaaaaaaccacttttcagtttattaatcgtaggaatcattacgcttccgcccattctcatgtataaaggaacgctttcgtataacagcttagatgaaatcggtaataaatacgaatcagtcaatgcattcaataccatttctgacaaatttgggccaggagaagcactgccggcaacgattgtcgtcaaatcagctgatctgttagacaacaataaagggctgattgctgttgaaaaactcagccgtgcaattgaacaaacagatggcgtaagtaaagtgagaagtgcgacacgtcctgtcggtaaagggctgagtgatctgtacgtgaaatcacaagccaaagagctgaataccggacttgataaaagcaatgaaggcttgaaaaaaatccaagatgcactgacgacaatgagtaaatctattgaagatcaaacgccgcagatcaaatcatctggaaaaggcattaaccagctgatttctggcactgaatcagtacaaacaggcattcaaaatgtcgagaaaatgttaagaaaactgcaaagcggaatcgatcaaaacaaaaacggtgtagcagagattaaagaaaaaattaaaagtgcgaaaaaggaattaacggctcaagtcgcacaagtgaatcagcaagttgcgctatataaaagcatttccaaagaattaaaggcagcattagcgcaagttgatacgtcatcctctgccgcagcggatgtaaaagcattaatcacacaagcaaatcaacaatttagtacactcgaaaaacaaattccacaggtaaaagaaaatcaatcgtatcaagccatcaaagcttcatataatgaactttctacgacgttaaaagaaggggcgaaacaggcagacagctatgccaaacaagcaaaagaagccaaaaaacagcttgaagcagcggatgcctttatcgcaaaagcttcagagcagcagaaagtcttgacgagtcaaatcgatgagctcattgctggtttagacgcaattgaaactggacttgatcaaacgtctaaaggtcaaggacagttagctgataatataccgaagcttgcaaatggagctggcaaagtgattgatggtcaaaaacaaatgaaagaaaagattggcggctttggtgatgacctgaccaagctgacagatgggctgaacaagagcgcaagtggactggagaaaatttcaagcgggttaatgggtgcaggtgactacttagacgaactgaaaaatgcaccagatcaagacatggccggctggtttatcccaaaagacgtgctgaaaaacaaagcattcaagcaagtatttgattcatacatgtcggatgaccgcaagatgacaaaaattgatgtcattttagaaaaaaatccatatggcaatgaagccctgtcgacgatcaaacaagtagaagcttctgtcgagcgggcacttcctgaaacgaacctaaaagatgcatcattcggcgtttcaggtgtatcaagtatgaacgctgatttaaaacagctgtcagaccaagatttcaataagacggttctttacatgatgatcggtattttcctcatcctggtgatcctgttccgttcgcttgttatgccgctgtacttggtaggttcacttattttgacttactttacagctatcgggatgacagaatttattttcacccatttcttcggatacccgggcattaactgggctgttccattctttggatttgtcatattaatggcgctcggagtcgattattcgattttcttaatggagcggttcaatgaatacaaaacaaaagacattcagtttgctatgaccgaatcaatgaagaatatgggctctgtcattatgtctgctgctgttattttggcaggaacctttgcagcaatgcttccttcaggagtgctgtctctcctgcagatagcaacacttgttctaacaggacttttgctgtacgcactcgttgtgctaccattgttcgtacctgtgatggtgaaattgttcggatcagctaactggttcccatttaaacgaaaagaatagatatttcaaatagaaagtaggaatccatgtgatgagtcgttgggcgctgataacaggtgccagtggcgggattgggcaggctgcagccaaaaagcttgcccatgaaggctgccacgtgatgctccattatcacaaaaatgaacagtcagccgtgcagcttgccgctcagctggaagaaacatgtcatattcagacgcacgtcgttcaagcggatttagctaaaatgggcggagcagatgagctcgtcagccgtctgcctgtatccccagatattcttgtattaaatagcggtaaaagtcatgtcggattagtgacagatacagaaaaagatgtattagccagtatggtgcagctgcatgtcacaagtccatatgagctcacccaacacctattgccagccatgattcaaaaaaaagcaggtcatattgttgtagtaagctcgatatggggagaaacaggtgcatcgtgtgaagtgctgtacagcatggtgaagggggcgcaaaatgcgtttattaaaggtctggcaaaagagcttgccccaagtggaattagagcaaatgctgtttcgccaggtgctgtccgtacagacatgatgaaaagcttcacacaagaagatattgcaatgcttgaggaagaaatcccgcttggccggcttgcatcacctgaggagattgcaaatgtcatttggtttctcgcctcaaagcagtcaagttatatgacaggtcaaattttatccgttaatggcggctggtactgttaaaaaacgtgtataattcgtctctccatgacaaaagctatggctgtaattcatcttttcgaatggaggaatcgacatgtcagtacttgagaactgggaccattggaaaaactttttaggtgaccgtttaaatcatgcgcaggataaaggtttaaaagatgataccatcaataaccttgcgtatgaaattggcggatatttagctaacgaagttgaagcaaagaacgagcaagaaagagtacttgctgacctttggagcgttgcatcagaagatgagcagcgcgctattgccaatatgatggtcaagctggttgaaaataatagctcgcactaaacaaaaagaggggtcgtttgtgcctctctttttattttaaccgtttagcaacattgtgctttctaaaaatgtgaaaatgctttatgataaaggaaggtaaaaatttgccacaatgaagggggtaatatcatttggcaaagctcgaatggtattttgaatatgagatacaggtaaaccgtcccggactattaggagacatttcttctctaatggggatgctttcaattaatattgtgacaattaatggtgttgatgtatcaagacgcggaatgcttttgcgctgtgaccacacagatcaaattaagcgccttgaatcaattttaaatacaatggaaacgataaaagtaacgaaattaagacagccaaaacttcgtgaccgcttagcggttcgtcacggcagatatattcagcgtgatgcggatgacaaaaagacgttccgttttgaaagggacgagcttggtcttcttgttgattttatggctgaactatttaaaaaagaaggacataaattgattgggattcgcgggatgccgcgtgtcggaaagacagaatcaattgtggcttcaagtgtatgtgccagcaagagatggctttttgtatcgtccactcttttgaaacagacgatccgaagtcagctgattgcggatgaatacagcccagataacgtctttattattgatgggattgtgtcgacgcgaagaggttctgagaagcacttgcagcttttaagagaaattatgagactgccggcaacgaaggtggttgagcatccagacatctttattcaaaattcagaatatacaatggatgatttcgactatatcattgaattgcgtaatagtgcagatgaagagattacatatgagcacgctgaagaaccacaagtgtttgatcattctggtttttctggcttcgatttttaatatggtaatggtaggtgtttgttttgactgaattgggaaaacggctcattgaggccagagaggaaaaagggatgtcgctggaggatcttcagacggtgaccaaaatccaaaagcgctacttgctagcaatcgaacaaggaaactatgatattattccaggtaaattttacgtcagagcgtttattaaacaatatgccgaagccgttggactaaatcctgaacaattgttcgaagaatttcgtaaagatgtaccgagcacgtataacgatgaagtatctgataaattatcaaatattaagccgcaaagagagctgccaaagcctgcctcgaaggtgcttgagctgctgccgaccatcttgattattggaggcgtccttgtggtcatcgcgatcatttatgtaattgtgcaggcggtcaatcatgatagcgggcagaagaacaatcaggcggctcctcagcagtcagaatctaaatatgaagtatctgaggattcatctctcgcaaaggatcaaaagaaaaaagaaaaagcttcgtcagatgatcaagaaaaatcatctaaaaaagatgattcatcaaaggattcatccaaagacgatgaaacggtctctttgaaggcagcgaatacggaaggctcaacgacaacgtatgaagtgtcaggtgcagatgagatggagttaaccatttctgcaacaaaagcttcatggctgcgcgtcagagacgaatctggaaaagtgctgaagatgggtgaactaaaagatggcgaatcgtttaaaacagacttgtctgagctctctcaggtcgatatccgtctaggcaatgcgactggaattgatatcaaggtgaatgacgaaacgcttaagtacgaattagaccctaaaaacaccatgacacaaaacattgtgattgtgaataaaggaaaggaaaagtcatcttaagcaagcagatgacttttcttttgttcctactattatatatacataaaaaaatggcttattggaggattgaatttcatgtttaacttaccgaataaaataactctttccaggatcgccttgatccctgtttttatgatcattatgcttgcacctttagattggggtgttgcgcgttttggtcacgtcagcatcgaagtgacgcatcttgttggagcaatcctgtttattgtcgcttcgacaactgactggattgatgggtactatgcgcgtaaacttaacttagtgacaaactttggtaaatttttagatccgcttgcagataaattgcttgtttcagctgctttaattatacttgttcaatacaacctcacaccggcatggatggcgattgtgatcattagccgtgaatttgctgtaaccggtctaaggcttgtattagccggaggcggtgaagtggtagcagctaatatgcttggaaaagtgaaaacatgggcgcaaatcattgcgatttcagcacttctattgcataacctgccatttgaacttgtatcatttccgtttggtgaccttgcgatgtgggtagcagtgttcttcactgttgtgtcaggctgggattactttgcaaaaaactgggaagctttaaagaattctaactaaaaaggacgtgtacgctttgaagtcagagagaaaagcagaaattattgcagtcgggtccgaacttttgctagggcaaattacgaatacgaatgcacaatttatcagcaaacagctagctgaaattggtgtgaatgtttattaccacacagcagttggtgacaatccagagcgtttaaaaagggccattcaagtggcgcaggaaagatctaattttattatcttctcaggtggtcttggaccaaccaaagatgatttaacaaaagaaaccattgccagtacgctcggaaaagagctcgtgctaaatgaagaagcatttgaatccattcaagactactttcgaaagactggacgagacatgtcgccgaataaccgtaagcaggcactcgttctagaaggatctgatgtgctcgtaaaccggtttgggatggccccaggtatgtttattcaagaagacgatacattttatatgttgcttcctggaccgccaagtgaactgcatccgatgtttgagaacgaggcgaagccgctgatttctgagaaactgggtttaaaggaaaaaatcgtgtctgttgttctccgcttcttcggaatcggtgaatcacagcttgaaacagacctagaagatttaattgatgctcaaaccaacccaacgattgcacctctcgcatctgacggtgaagtgacacttaggctcacggctaagcatgaggatgaaaaagaaacggaacgtctgttaaaagagacggaagcgaaaattttagcacgggtaggtgagtacttctacgggtatggtgatacatcactagtccgtgaagcttccaaggccttgcacgaacacgggaaaacagtggcagcggctgagagcctgacaggcggaatgttttctgaatggctgacagatcttgaaggtgcatcatcgattttaagcggcagtgtcgtttgttatacaaatcaagtcaaacagcaggtgcttggctgccgggaagaaacattgtcttctcatggtgctgtcagcaaagagtgtgctttagagcttgctgaaggtgctagaaagctcgcgggaagtgatattggcattagttttacgggtgtagcaggccctgatacccacgagggacagcctgttggaaaagtgttcatcgggctatctacgaaagaccatacagacgtgtttgaatggatgtttacaggaagccggtcgggcattcgaaagcgtgctgtgaaatacggtctgcatcacttgctcaatttattaaaagaaagttaattttgttatttgttaggtttactcctttataaaagagtgttttttctaatagaaatcactcttttcttaaaaatctgccaagaaaaaatcgaatatgtgttcgtttttttcttggcaaatgacgtaaaacaaggtatagtatagatagtggaattgataaaggaggaaacaatagaatgagtgatcgtcaagcagccttagatatggctcttaaacaaatagaaaaacagtttggtaaaggctctattatgaaactaggagagcaaacagatacacgcatttcaacagtaccgagtggttcgttagcacttgatactgcacttggaataggtggatatcctcgcggccgtattattgaagtatatggtccagagagttctggtaaaacgacagtagcacttcatgccattgctgaggttcagcagcagggaggacaagctgcatttatcgatgcagagcatgcgctcgatccagtttacgctcaaaaactaggtgtcaatattgatgagctgttactttctcagcctgatacaggagaacaagcacttgaaattgcagaagctcttgtccgcagtggtgcagttgatattgttgttattgactcagtagctgctcttgtaccaaaagcagagattgaaggggacatgggtgattcacatgttggtttacaagcacgtttgatgtcccaagcacttcgtaaactatcaggtgccattaataaatcgaaaacaattgccatctttattaaccaaattcgtgaaaaagttggggtcatgttcggtaaccctgaaacaacgccaggtggacgtgcgcttaagttctattcgtctgttcgtttagaagtgcgccgtgctgaacagctgaagcagggcaatgacattatggggaataaaacgagaattaaagtggtgaaaaacaaagtagcaccgccattccgtattgcagaagtagacattatgtacggtgaaggaatctcaaaagagggagaaatcatcgaccttggaagcgaactagatatcgtacaaaagagcggtgcttggtattcttatcaagaggaacgtcttgggcaaggccgcgaaaatgcgaaacagttccttaaagaaaacaaagatattcttctcatgattcaagaacaaattagagaacactacggtttggacacaaacggagtgaaagcagctgaagaagaagaaggacaagaggaattggaaatttaaagactaaaagacgctgaaaagcgtcttagatggttgacaaagggctaaaatgatctttattttagccctttgtcttcttttcagcgtgatagaaaacctttgaagtctaggaagggcgagtaccggagcggagcgaattaaacattcgtgagcaccggagcgcagacctgacaccgaatgcgagggtttgtctacacgctaaagacgctgaaaagcgtcttttttttacatttacatgacagctagcaggtcaaaagttctgtctttgcttgaaataacgacttacgcctcagtctgactagcttgacaagtatttccgacacaattacaatgggaatgtatcacttgtttttcttaacatgattgataactaatttaaacttgacaagggcagtgaggatctcattccctgtgaaggccctgtatgttgagacacaaaacaatgtacatgccgacactttatttgtaaaaccaagttcatagcaagaggaggtgaaaatatgtcgcctacgatgtttacgatcatctccattttgctgagcctaatctgtttagttgttggctactttgttcgtaaaaccattgcagaagcaaaaatatccggcgcaagaaacatggccgaacaaattgttgaggatgcaaagcgtgatgcggaagcattgaagaaagaagcgctcttggaagcgaaagatgaaattcattcctttcgtgtagaggcggagcaagaagttcgtgaaagacgtaatgagcttcaaagacaagaaaaccgtttacttcaaaaagaggaaaatcttgatcgcaaagacgaatctttagataaacgggagtccctgttggagaagagagatcattctctgaatgaacgacaacaacatattgaagagatggaaagcaaagtggatgatatgattcgtttgcagaaagccgagttagaacgcatttctagtttaactcgagatgaagcgaaacaaatcattctggatcaagttgaaaatgagctttcccacgacattgcagtcatgacgaaagaatctgaaaaccgagcgaaagaagaggctgataaaaaggcgaaaaacattctttcacttgcgttacagcgttgtgcagctgatcatgtagctgaaacgacggtatctgtagtcaatcttccaaatgatgagatgaaaggtcgtattatcggacgtgaaggacgaaatatccgtacgttagaaacgttaacaggtattgacttgatcatagatgatacacctgaagctgttatcctatcgggctttgatccgattagacgtgaaacagcgaggatagctctggacaagctagtccaggatggccgcattcatcctgcacgaattgaagaaatggtggaaaaatcacgccgtgaagtcgatgattatatccgtgagatgggtgagcaaacgacattcgaagtcggagttcacggtctgcatccggatctcatcaaaattctcggtcgcttaaaattccgtacaagttatggacaaaatgtcctgaagcattcaattgaggttgcacatcttgcaggtctcatggcttcagagcttggagaagatgcaaagcttgcaaaacgagcaggtcttctgcatgacattggaaaagccattgatcatgaagtagaaggaagccacgtagaaattggcgttgagcttgcgacgaaatataaagagcatcctgttgtcatcaacagtattgcctctcaccacggtgaccaagaaccgacatccattatcgctgttcttgttgcggcagcagatgcattatctgcagcacgccctggtgcaagaagtgagacgcttgaaaattacattcggagacttgagaaattagaagatatctctgaatcttatgaaggtgttgaaaaatcgtttgcgatacaggctggacgtgaagtacgtattatggtgaagccagattcaattaatgatcttgaagctcaccgtctagcaagggatattcgtaagcggattgaggacgagctcgattaccctggtcacattaaagtgacggtcattcgagaaactcgcgcagtagagtatgcaaaatagagcggtgcgcttagcgccgctttatttttttgtgtaaatatgcaacactgataagaagtcaatttataagagaaagggttcaaagcgcatgaaaatattatttgttggagatatcgtcggttcacctggacgagacacactgaaagaatacttaccaaagctaaagaagaaatatcagccccactttaccattgtcaacggagaaaatgctgctcatgggaaagggataactgaaaaaatctatcatgagctgctgcaagcaggagctgacgtgcttacaatgggcaaccatacatgggataaaagagacatttttgatttcatcgatgacgcagccaacatggttcgtccggcgaacttcccagaaggcacacctggtaaaggtcttacgtttataaaaaaacaaggaaaagaactggccgtcatcaatttacaaggacgcacttttttaccgccaattgactgcccgtttcaaaaagtagacgagttaattgcggaagcatccaaacgtacaccgttcatttttattgattttcatggtgaagccacaagtgaaaagcaagcgatgggctggtatacagacggccgtgcatcatgtgtcgttggaacgcatacacatgttcaaacagcagataaccgcgttttgccaaaaggaactgcgtatatttcagatgtgggaatgacaggaccttatgatggcattttaggtgttgatcgagagacgattattaaacgattcaaaacgagtcttccagtccgttttgagattgcagaaggacgcacaacattaagtgcagtaatcgtagaaattgacgaacagtcgaaaaaagctgtcaatattgatcgaattttgataaatgatgaccatattttctttgaataaatgttcacatatttatttcagaaaaatattaatcagaaagaaggaatatgcgccctctatcgtgaatatagtaaaaatggtaggtagcctgctatttttgaaaaacattttggggatggattttcaaaaaatagcatcatctaacaaagattgttctaatgaacactcacttatccattgtaaatttaagggggagcagaaatggaaattttaaaagtttcagcaaagtcaaatccgaattcagtagcaggagcattagcaggcgttttacgtgaacgcggtgcagcggaaatacaagcaatcggcgctggagcgctgaatcaggcggtcaaggctgtagccatagcaaggggatttgttgcaccaagcggagtggatttgatatgcattccagcctttactgacattcttatcgatggagaagaaagaacagcaatcaaattgattgttgaaccacgataattctaattttattattttcaacctgcttacatcatgtgagcaggttgtttttgtttaccactatacatttcttatataacatattcagttcatgaaatagataaaaatgacatattagagcttgcattttttcaccaggatgataaattaagatgaagttaaaaatacttcatcaaaaataaatatttaagtaggtgaaataatgttcgaagcttttttgaaaagaggaaagcttgtttttattttattttttattgttctcattgctggcggctatttattcgcgcagctccctaaacgagaactgccagaattccaagcgaatatcgtcacgatttccaccgtgtttcctggtgcggatgcaaaacaggtggaaagtgatgtaaccaataagctcgaatcagccatatctgatatcaatggtgtagagaaaacgagctctgtttctgccattggtttttcaaatattgtgcttgaaattgatgatcaagccgactttcaaaaggtggcaagtcagattaagaatgaaaccacgagtgctgcgtcgtcctttcctaacggagtgatggagccggatgtaaaggatgagttcggcaacgtgccggttggttcttatatggttgtggcgagtcaattaacggacttggcaaaaagtcaggaatcgctgcgtgcgttgaaggaaaaggttgaggacatcaaaggggtagacagtgtcgtcatcaaaggattcaatgacaaacaagcggtattaaacttagactcgagtaaactggaggatgaagggttaaatgtaacggatgttacaaatgccatcaatcaggaatttgacacatctccactaggcgacattcgggcaggtggcgagaaggttaagctgtccattgatgcctatgaccgtttggatcaagtgacaaagattgagcttttctccaaaacgaaccgtgagccggtcacaatcagtcagattggcagcttaaaagaagtagaaaaagagaaaagtgacattgtgtcgtataacggaaagcccgcctattcatttacagtcaatatcaaaccagggcttgatattcctaaaatgtatgacaaagtcagtgatgttattaagaaagagaagcagcttccaaatggtgtggagtgggtagactactattcacaaaaaaatgatgtggatgccatttttaatgatttaataaaagaagccattgttgcggtcatcgctgtcattatcgtcaccacacttggtcttaccattggcggtgcgttcatcgtttcacttgccatcccattatcgatcacaatcggaacgattccgctgccatttttacaagtggacctcaatcagatttcgattatcggctttatcattgccctaggaatacttgtcgatgatgccattgtcgtcaacgataatattttaaggcagatgaaaaaatacgaaagtccgcttaaaggaacgattgcaggtgtgaaagaagttgcagggtctattttgacttcaacacttgcggttgtgtttgctttcttgccacttgttttcttatcaggtgcaaacggttcatttatacgagcattaccgtctgtcctagtcacgactgtacttgcgtctatggtgatttctctgacactagtgccagtctatcaatataccgtgaaccgaaaaagaaagaacaagaaaattcaaaaagagccagggttcctaggcaaaccgttaaaaaaattagctgatttttatgcagaccgtgtgctgacgaatattgtgaagcgtccgctgcttattggcctaagtggtttgctcgttgcaacgcttgcctttttactgattttcgtcacaccatttgaatttttccctgcagcgaataagaaagaagtggttgtcactgtcacacttccaagtgaaacaacattagacaaaacaaatgaaacattagagaaaatagaacaagagatgaaacagcagaaaggcattgaagagacggcgatctttgcaggcggcggtgtaccgaacctgtttaatgaaagtatctcaaatgcaagtgatcatactggtcaggttgttgtgagagtagacaatgatcagatgacgagtaaacaattgatagatcgtatgacagagcctttgcgtaagaaattcaaagatgctgatatctttatgaaaaccattgttcaagggccgccaaccggtgcgcctgtgactgtaaccattgcgggtgactcttttgcaaagctcattaatatcaaagaaacgctcacaagtgaaatgaaagaaaaaggagcgagcttgatcactgacgatgtcaatcagccggtaaaaaccatctcctttgaattaaaccgtgaccgaatggcagaggatggactcagcgctcagtttgtcagcagacagctcggtctagtgacagaaggcatgccattaggcagctttaaacaaggaacaaaagataacgacctagtcgtcaaacaggatatggctatacaccaaaatggattaaagctaaaagaaataaaagtgcctgtcaattcaaatgaaggtggtatgccttcactcgagccgcttagccgatatgtaaaagaaaaagaaacagagcagtacgaaagcattccacatgaaaatggaattccgaccattacgctgaaggcgtaccctggcacgtcagagtcgtttaaagatgacatgaaagaagtcgtcaatcaagtaggaaaaacggatgcagcgaaggagctaaccatttctcaaggtggagaaaatgaagatcaagcccagttctttattgaaattagtctcttatttggggttgtcttgctgctcatttatgtgaccatcgcttttcagttcaattcattgatgcttccattgttagttctaggtacggtttacttagcgatatctggagctgttataggactgtttgtcacacaaacaccgttcagcttcatggcaacaatgggaattgtctcattagctggtatcgtggtccgaaatgcggttgtcttgttcgaatttattgagcagcggcgtaagcaaggattcgatcaacagacagctgtcattgaagcgggaagagctaggattaggccaattttacttacagcctttacagcactggttgcccttatgcctgtagcattaagtaatgatccgctctttaagccgctggcaatctgcatagtttcgggtgtctttttctcaacgattctcacacttttcattgtgccagccttatatattgccgtttcaaaaagacggtgacgcaaaaagcaaatctccttctctacggggatttgcttttttttttagaaaaatatccaaaaaaatatgtggagtgttcatttgtctttttacagtagacagtggtatttacgactaaaataagacgtgttaaaatctcattgggagaagtttttttaacaaaggggttgtacgtcatgtgtggaacgatgaaagcaattgttaaaaaagaaagcgcttacggagcggtactgatggaaatgccgattccagaaatcaatgatcatgaagtattgattcaggtgaaagccacttcgatatgcggaacagacgtgcatatttataactgggatgactgggcaaagggaagagttaaagcgccctacatttttggacatgaatttacaggggaagttgtcaaggcgggaaagcaagtctcgcgtgcaaaagtaggggattttgtatcggcagagacacatgttgtatgtaatcagtgctatatgtgtttaaccggtcagcagcatttatgcagtgaaacgaaaattttaggggtagacattgacggctgctttgctgaatatgtcaaagtacctgaacaaaatgtgtggcacaatccagctcaaatgccagtagagcttgcgtctatccaagagccgcttggaaatgctgttcatacagtgctgcacacacccgtttcaggtaagtcagtggcgatttttggctgcggaccaatcggtttaatggcgatcgccgtcgcgaaagcttccggtgctgttcaagtgtttgccgtcgatcaaaacgaatacaggctggatcttgcccgaaaaatgggggcagatcatatcgtggatattggaaaagatgatcctgttgaggtgattaagcagttcacacggatggaaggagcagatgtgatatgcgagatgtcaggacatccagttgccattaatcaagctctcgaagcttgtgcaaatggagggaaagtcaatatactaagcttgccagaacggccagtgacaattgatattacgaatcaaattgtttttaggggattaaccgtccaaggaatcacggggagaaaaatgtttgagacgtggcgtcaagtatctgagttattaagaacgaataccatcgatgtccagccagttgtcacccatacgctgccatttgaacagttcgaaaagggatttgaactcatgagaaatggtacgtgcggaaaggtcgtactgatgctgccatcaaatcaaagggggaagaaatgatgaaagaattcacgtatttacaagatgaattggaaacaatgaagcagcaaggcacccaccaaacattgaaagagatcgactcaaaacaatcatccactgtgacattaaatgaacaatctgtcatacagctctcctcaaataactacttaggcctcacctcacatccaaggctgatgaaagcggcaaaagagggaattgatgaatttggtgctggcacagggtctgtacgaaccatcgccggcacaatgacgatgcacgaacgtcttgaaaaaaagctcgctgcatttaaaaagacagaggcagcccttgtgttccaatcaggctttacgaccaaccaaggggtcttatcaagtatcctgacaaaagatgatattgtgatttcagatgaactgaatcatgcctcaatcattgacggcatccgattaacaaaagcagataaaaaggtatacggtcattccaatatggaacagcttgagaaaattttaaagaaatctatgaattaccgcatgcgtctcatcgtcacagatggtgtgttctcgatggatggagatattgcgccacttcctgagattgtcaggctcgcagaagcatatgatgcatttgtgatggtagacgatgcgcatgcctcgggcgtgcttggtgaaaatggccgcgggacagtcaaccatttcaaactcgacggcagagtgcatattcaggttgggacacttagcaaggctgtcggagtgctcggcggctatgtagcgggatcagccgttttaattgattatttaaagcataaagcaagaccgtttttattcagcacctcacatccgccagcagtgactagagcgtgtgaagaagcgattgaagtactgttagacgaaccaaagcgaattagcacgctctgggaaaacgccgcctattttaaaggaaaagtcgtcagccttggatttcaagttgctccgacagaaacaccgattattccaatcatgattggagacgaagctcttactttccgcttttcaaaggctttaatagagcgaggcgtgtttgctcaaggcatcgctttcccaactgtggcaaaaggaaaagcgagaattagagccatcatcacagcagagcacacaaaagaagaactagaccgtgcactgacggtgatcaaagaagaagcaaaaaaactgaacatacttgattgagagagcgcaggctctctttttttaataaagagattagctgtgaccttcttgctgaataggcattttttatagaaaaactgtatatgaatttattttcaattcatcacaaaatagtctatactgtagggtggagcttggtttgaaaggagtacaaattcatgaatgaagagcagagaaaagcgagcggacaagtaagttcatcggacaaaaaatccgagaaggactacagccagtattttgaagctgtgtacattccgccttccttaaaagaagcaaaaaaacggggtaaagaagaagtcgaatacaatcaatttcaaattgacgagcggtttcaaggtttagggaacggccgcaagttttatattcgaacatatggctgtcaaatgaatgagcatgacacagaagtgatggctggtatctttatggcgcttggttatgagccaacaaactcaacggaagatgcaaatgtcatcttattaaacacttgtgcgattcgtgaaaatgcggaaaacaaagtgttcggagagcttggtcatttaaaagcattaaaacgtgaaaagccagatttaattttaggtgtctgcggatgtatgtcgcaagaggaatctgtcgtcaaccgtattttgaagaaacatccatttgttgatttgattttcggtacacacaacattcaccgcctgccagagttgttatctgaatgctatctttcaaaagaaatggtcatcgaggtttggtcaaaagaaggcgatgtcattgaaaaccttccgagagcccgccaaggaaaaattaagggctgggtgaatattatgtacggttgtgataaattctgtacatactgtatcgtcccttacacgcgcggtaaggaaagaagccgccgcccggatgaaattattcaagaggtcagacgtttagcggcagaaggatataaggaaattacccttcttggtcaaaacgtgaatgcgtatggaaaagattttgaagacatggaatatggtcttggacacctgatggatgagctgcgtaaaatcgatattccgcgtatccgttttacaacaagccacccgcgtgactttgacgatcacttaattgaagtgcttgctaagggtgggaaccttctcgatcatattcatttgccagttcaatcaggaagttcttctgtattgaaactcatggcgagaaaatatgaccgtgagcgttatcttgatcttgtgcgcaaaatcaaagaagccatgccaaatgcttcattaacaacggacattattgttgggttcccaaatgagacagatgagcagtttgaggaaacactttccctctatcgcgaggttgagtttgatgccgcttatacgttcatttactctccaagagaaggaacaccagcagcgaaaatgcaagacaacgtgccaatgcatgtgaaaaaagaacgtctgcagcgcctgaatgccctcgtgaatgaaatttccgcgaaaaaaatgaaggaatatgaagggcagactgtcgaagtattagtagagggtgaaagtaaaaacaaccctgaaatcctagccggatatacaagtaaaagcaagcttgtgaattttaaagcaccaaaagaagcgattggcaacatcgtcaaagtgaaaatcacacaagccaaaacttggtctcttgacggagaaatggttggagaagctatcgaggtgaattaaaatgacgctttattcaaaaaaagagattgtcgagcgtgcaagagagctcgctaaaatgatttctgaaacagaagaagttgatttcttcaagaaagcagaagcgcaaatcaatgaaaatacaaaaatttcaacgattattaatcaaattaaggcgcttcaaaaacaagctgtgaatttaaagcattacggcaaacatgaagccttaaagcaagtggaagaaaaaatcgatgccctgcaagaagaactggatgaaatcccggtgattcaagaattcaaagaatcacaagtggaagtcaattccctgcttcagctcgtagcgcatacgatttctaatcaagtaacagatgaaatcattctttcaaccggcggtgacctcttattaggagaaaccggttcaaaagtgaaaaactcatcaccaagttgctccattaaatgagaaaaccccgcagatgcggggttttttgctttgctatcatcattttttgaaagaacagaagaaattcacccttcctgttctacctcttgcttcgtcaccccaaaatctctcactctccaacttttccaattttcaaggcaagtttatgggcgaccatgcatacactgaaacagaaatgaatttaattgaacatgaagttcaaaatcgtgacacactagacgaatgcccagcataagataaaacgatcaagaacaaggaggcatgccggaatgtctgaatacagagagattattacaaaagcggtggttgcaaaagggaggaaattcacccaaagcacacacaccatttctccatcgcaaaaaccaaccagcatcctaggtggttggatcattaatcataagtatgatgctgaaaaggtcggtaaaactgttgagattgaaggaacctttgatattaacgtatggtattcttacgctgataacacaaaaacagaagtcgtcacagaacgggtgaaatatgtagacatcatcaaactgagatataaagataaaaatttccttgatgatgagcatgaagtgattgcaaaagtgctgcagcagccgaattgtttagaagtgaccatttcaccaaacggcaataaaattatcgttcaggcagaacgtgaattcattgctgaagtggtaggagaaacaaaaattgttgtagaggtcaattcaagctggaaagaaaaagatgatcacgagtgggaagaagaggtggatgaggagttagaggatattcatccagaattcctagcgggtgatccagaagagtaattgatgactagggcgcatatccccctagtttttttgtgtcctatctaggagaaaaaaggggattttttatgctataatgaaagatggtatgaattcgaatgtaatatagtgagggattagaaatatggcaagttatacgcccatgatacagcaatatttaaaaatcaaggcagagtatcaagatgcctttttattttttcgcttaggcgatttttatgaaatgttttttgatgacgcaaaagaagcggcacaagaattggaaattacgttaacaagcagagatggcgggacaataccaatgtgcggtgtgccttatcattctgcttctgcatacatagaacaattgatttcaaaaggctacaaggtcgcgatttgtgagcaggtggaagatcctaaaacggcaaaaggtgtggtcaaaagagaagtcgttcaactcattacaccaggtacggtgatggatggtaaaggcttaagtgaaaacgaaaacaacttcattgcatctgttacaagatttgaaaatggatacggacttgcactttccgatttatctacaggtgaaaatatggcggctttcatcgatcgattagatgaagtcgtgtctgaaatttattctgtcggtgcaaaagaaattgtggtgtcaaagcagctggatgaggaaacagtcaaaacattaaaggaacggtgccaagcgaccatttcatacgaagatagtgatgagttaatcgatgaagctgagcgactcgtgtcccgcctgagcgagcagctaagatcgacctttttgacattatatgcttatttaagaagaacgcaaaaaagaagtctcgatcaccttcagcaagtgcaagtgtttgagctcgaacaaacaatgaaaattgatctttactcaaaacgaaatcttgaattaacagagacgatccgctcaaaaagcaagaagggctctttattatggctgctagatgaaacaaaaacagcgatgggcggaaggctgctcaaacagtggatcgaccggccgttaattcgtctttcgcaaattaaggaacgtcaggaaatggtgcaaattctcatggatcatttctttgaacgagaggatctgcgtgaacgattaaagcaagtatatgatctcgaacgtctagcgggccgcgtcgcatttggcaacgtaaatgcccgtgatctcattcagttaaaagaatccttaaagcaagtgccagccattaaagagcttgtgcactcactgccagaggaaatggcgaaatcaagagcgaatgatattgatccttgtggtgacttacttgatttattagaagatgcgctatatgagaacccgccgatgacgttaaaagaaggcaatttgattaaagacggctacaatgcaaaattagatgaataccgtgatgccagccgaaatgggaaggactggattgcacggcttgaacagcaagaaagagaatacacaggcattcgctccttaaaagtcgggtttaataaagtgttcggttattatatcgaagtgacacgcgcgaatacgcatcttctggaggaagggcgttatgaaagaaaacaaacgcttgccaatgcagagaggtatattacacctgaattgaaagaaaaagaagcgctgattcttgaggcagaatcaaatataagcgaactggaatatgaactattcgcagctctcagggaacaagtgaaagtctatattccgagattacagctgctcgcaaaacaaatgagtgagctggatgccctccaatgttttgcgactgtcagtgaaaagcgccgttatatccgtccggaattctcagaggatgaggtggatgtcatagatggccgtcacccagtcgttgaaaaagtgatggatcatcaggagtatgtgccaaatgactgccatatgggaaatggccggcaaaccttactcattactgggccgaatatgtcagggaaaagtacgtatatgagacaaatggcgcttatctcaattcttgcgcaaattggctgctttgtgccggcatcaaaggcgacccttccgatctttgatcaaatctttacacgcattggtgcggcagatgatttgatttctggtcagagtacttttatggtagagatgcttgaagcaaaaaatgcgatggtgcatgcaacgaaaaacagcttgatcttatttgatgaaattggacgcgggacaagcacttatgatggaatggctcttgcgcaggcaatcattgaatttgttcacgatcatattggtgccaaaacgctattttctacacattaccatgagcttacagtccttgagtctcaattaagcgagctgaaaaatgtccatgtacgtgctgaagagcatgaaggcacggtcgttttcttacatcaaatcaaagagggggcagctgataaaagctatggtattcatgtagcgcagcttgctgaattgcctgatgccatcatcgatagggcccagaccattttgacggagcttgagagcggatcacatgaagtgaccccgcacgtatctgcagccccaaaaacagaaaagaccgagggaaaacagcagctttctttctttgaagtagaagaaaaaccgcaaactaaaccagttctaaaacagaaagatcaagcggtgatcgaggaattaaagtcattcaacctaatggatatgaccccgctcgaagcgatgacaaagctatatgaattgcaaaagaaattataatataaggtgaggtgagcaaaatggcaaagattattcagttatcagatgacctatccaataaaattgctgcaggtgaagtagtcgagcgtccggcttctgtcgtaaaggagcttatggaaaatgcaatcgatgcaagcagtacagtgattgaaatcgatgtagaagaagcaggtctttcctctattagaatgattgataatggtgttggaatcgatgctgaagattgtaagctcgcctttcagcgccatgcaacgagtaaaatcaaagatgaaaatgatctgttccgtgtcagaacgctcgggttcaggggagaggcgctgccaagtatcgcatctgtctctcatctagaaatgaaaacacgtactggtgaaggagctggaacgcacctggtactgcaaggcggaaagatcatttcagagaaaaaaacctctggccgccgcggtaccgagattgtcgttaccaacttattttacaatacgcctgcccgcttaaaatacatgaaaaccgttcatacggagcttggcaatatatcagatgtcgtcaatcgaattgcgctggctcacccagaagtatcgattcgcttgcgacatcaagggaaagtcctgcttcagacgaatggaaacggggatgtgcggcatgtgcttgcggccatttacgggacagctgttgcgaaaaaaatggtgccgcttcacgtgcaatcacttgattttgaagtgaaaggatatatctccttgccagaagtgacaagggcatcacggaattatatgtcttctgttgtaaacggcagatatgttaagcattttccgctcgtgaaagcggtccatgaagggtatcataccctgctgccgattggccgccatccgattacatttattgagatgaagatggaccccattttagtggatgtgaacgttcacccttcgaagcttgaagtgagactaagtaaagagcaggaacttcatgagctaatcaaacaaggaattaaggaagtatttcaaaagcagcagcttattccaagtgcttcagtgccaaagaaagcaccaatgccagcagtgaaaaatgagcagcaatccttaacttttgatgcgaaaaaaataaacacaagcgtgtcggaaacgccgctatcctatcagccggagcctctcgaatcggttgtatacgagacaaatcagatgggcacatacgggacgcctgcgcaggaaatgacagggacgtcatcacccgtatttaatgaagatgctccatctgagcgtgttcatttagaggaatccgctgcttctcttgaatatgaagagtcagtactgagagaagatgcagcagaagccatttcagaaaacgaacgtgttccagtcatgtatcccatcgggcaaatgcacggcacatatattttggctcaaaatgaacgagggctttatattatcgatcagcatgcggcccaggagcgaatcaagtatgagtattatcgtgagaaggtaggagagatcaagcaggaagtgcaagaaatgctcgtcccattaacattccactactcgaaaaacgatatgctgattattgaagagcataaagagatactaacgaaagtgggcgtcttcttagagcctttcggttcaggaagctacattgttcggtcgcatccgcagtggtttccaaaaggggaagaggctgaactgatcgaagagattatagagcaagtgctaaatgagaagcgtgttgatatcaaaaaattgagagaagaggcggcgatcatgatgagctgtaaaggttctatcaaagcaaatcgccatttgcgtcatgatgaaatcaaagccttattagatgaactccggcagacaaaggaccccttcacttgtccgcacggccggccgatcatcattcatcactcgacatatgaaatggaaaaaatgtttaaacgggtcatgtgatcaaatgaaaaaaagacaaagggctaaaatcatcttgattttggccctttgtcttcttttcagcgtgatagaaaacctttgcagtctaggaagggcgagcaccggaacggagcgaattgaacattcgtgagtaacggagcacagacctgacaaagaatgcgagggtttgtctacacgctgaagcgctcttattagagcgcttttttatttagcatccacaaggatttggcggtgtgaccacaactggtcgtgtttgaatatcaagggtgtcctctgcataaaatttagaaccaatgctaagcgcacggttttctgcgcggaacgtatatgtacctgcagcaggaagtactttatgagaaagttgtaatttatattgtgagattcctaataaatcgattctagctggaatgcggacagtttttccactgttcaaaatgtagctgtcttttaatgcttttccattgaagatgtcttttgttgtcgcttgaaagcctgcaggcaatgtgaactcaatggcaccgatacttaaaatagaatttgggcggtatgtcagctcaatgtcagaaaaagaccattcctgcttacttgtacctgtaatttttgcataaagttcagctggtcttgcattcgttgatgctttgccttcctccgttttgactccttctgcggatgcggcaatcggtaccgatagtgccatgaccagtgtaagcattccgatcatgatcattgtccatgtttttttcattttttccttcccccttgttgaatataggcaaataatagatgattacacccattatttacctataaggttaccatattcctatatggtattaaatggtatattgtacccttattttttcactttgtttagtaataacgggggaaaaacgcatttggttggttcattccataaccatggcctgtcatttgctgatttggcatcatcatatgcatatcttgatatccgtatggatgatatggcatcattccgtatccaccatagtggccaagatgatggtgatctttcattggaacatgtgaaaaggcatcatgctgatttggaaacggcgaataggttgaatgatgatgcggatagtgtccgctgtacatatcttttttaccggtatgatcatgctttggcatattcataggatcctgcatgtttggcgcgaccacatgctcatgattggctgtatacacattctcaaatgtatgataggggttttcttggtgatgatgattcattgggctattcatattgttcatttgatatctcatcctttatgtcaggttgccatatcctatgagcatgatccgtttcatgagcctatccatatgaaaaaaaccggcttttcagccgggaaaacgaaaagcaggtgaaagcgtcaattgctaatatgagaagccatgtcttcttctacgacgcttcttacagctgctgcagacacttttaggacagtaatagggatcgtagcttctagaagtatcccagaaatcgctctcaaaccatttatcttttttatgatgaaactttttttctttacatggatcctcatggcaatgatcgtcatgctttttataacagtttgagtgggaatgtttgcacttgcatttgcacattgtcatccctcctaaatgtgactcaatgctagtatatgcaagaataagacaaggggactggataatggcgctttttttgtaaaaaaaggctttttctgaaaaactcaaataaaaagaattgactagtgctaaaataacatgatagaatataaatttttatccaccgatgaaatgtgttataatcataatgtgaatactttcggaggtggcggatttgtttcaaataggtgataaaattgtttatcctatgcatggtgccggtgtgattgaaggaatggaagaaaaagagattttaggtaagacggaggaatattttctgattcaaatgccgaatatgcagatgatgatcccaagaggcagaatcaatcaactaggtatacgtccggtagcagatcaagcaacgctgaaagttgtgatgaacaattttgcagaagaaacaaacgacgacacgcttacttggaagcaaagatatgatgaaaatctgaaaaagctaaaaacaggtgcgatcgaagatggtgcagacgttgtcaaagatctgatgagacgcaatcagaagaaagcattaaattcaagtgaaaagaagatgcttgaagatgcacgaggcatgttagtgagtgagatttctcttgcacaaggactgtcgcaagatgaagtcctttcagctttagagaatgaactaagagtttaatgatggatatacagtaattggctgtaaacagaagggcataccttttgtttacggctttttttgtttgaaatcagaagaatatgtccatttttgtaggtgattttaactaaagctaaaataaggtcatacgatgcagtttttattcaagcaacgaatgattcaaagaagtcagaaatacctagggcagcataaaaaacaggtaagttctcctgattcgttcaaatgagccggacaacctttgaattctgttagccattgatagtaaaataatgcgataagatgacacctaagagaatgaaaaggagcggtgaaatgaaaaggctactgatatgtggattcatctttctgatcctgtgtgctcttttaatggtgaaatgcagccattctgttcaagaaaaaaaagagcaaaagcaatatcaagaagaggtagaaaagtatcaaaaagagcgaaaaaaaggggatcaatatgaaagctttaaacagcttatccgacatgaaagagaaggctatgaaatagaatttcacgaaaagggtggaagtgatttactcgtcttttctcctcatggaggggaaattgaaccaggaacaagtgaaattgtagaagcatttcaagaaaagtactctacgtatttgtttgaaggaacaaaacaagacaataatcgtgatttgcatattacaagcaccaagtttgatgaaccgatattggttcaaatgattaaaacgtaccccttctccatttctatccacggctataaaagtgataaaagacacacgctagttggcgggacaaacgaaaaaatgcaaagagcagttgtacgagaattaaaggatcgaggattttctgcagaaatggtgcaagaaggcgaacggctttcaggaacagatcccaaaaatattaataatcgaaatgcgagtggtgaaagtgttcagctagaaattagtacggcgcagagagaagcctttttcgacaattttgatacgagaaaaggaaagaaaaaagcattcagacgttatatcagtgctttaaaagaagtattaagagaatttgacccatcttcgtagaaaaaccgttttgatgggcaaaagtactctatttaaacttggtaaaaaagatagaaatatgcgaaatgaacataaattatgtaataacttacaatttgccttaaaaacataaattatgtaaaataatagttatcagtttgatatgatagaatggggctgaagtggatggcacacaaaataccatcttccgaagtaggtgtaaagatcaatcaatggtacacgcatatttgcaaatttgaagtcgaacaagcaaacgatatgaagcgccttgttgaagaagaaattcatgagatggaagaggatcaagatttacttctatattattctctaatggattttcgccatcaaatgatgcttcagcatttaacgccagtccatgcagggagtgaaacgcttcaagccgtgtcttttccgaaagaaatggaagatggagaagatgagatgacaggcttgctcggctattactttcattttttccatggaatgtatgcgtttatccagcgccggtatatcgaggctatttcctattacaagcatgcggaacatcaactgatcttagtgacagatgagattgaaaaagcggaattttactataaaatcgctgaagtatactatcatatgaaacaaacttatttctccatgcattatgctaaaaaggcgagagacatttataagaaacatcagctttatggaaaaagaagcattcaatgtgattttgtcatggcaggtaattggattgatgtgagtcagcaccaaaaagcgcttccttatttagaaaaagcgttaaaggtctgtgaagcgatggaacggcaagaatgcacatcttattttaaagcgatggctcttaataacttaggtgcttgtcattatagtatgggaacgtatcatacagcgactgtcttttttgaacaagccatttccctttatcaaaaagatcaagcatccacgatgatcaaatcattattctcacttgcccttacttgttttaaactcggagatatccagcgggctggcgaggctatacgtaaaggaatgaacgaggcttgtttattggaagatgaaatttatcagttgaaattccaatttttgcaggcgctttatatagaaaaagacagctgtgagcaattaaggtcggccctttttggtctgcgaagcaaaaaaatgtttgctgatttagaggaattagcacttgatgcggctaattattataaggaacgcgacatgtacaaggaatcttccactttttttgagattgtgatcgaagcgcgtacgcacattcaaaaaggagatgagatgtatgagaacgaagcataacatgtcagctgctcaagtagatgaaagacttcacacgtaataacagacaaacaacaccctttacgaatcaacgtaaagggcttttttaatttattctttgatggctttttctgcgtcaatggcacctgctccgtaaatcatcgggtcatctccagaccacttgcttgtattttcttttaacagggttttgacatcatcgggcgttaaatctggtgaatgctctaatagaagagcgcaaataccagcacaaatcggtgttgccatagatgtgccagataacgccgtgtaatcgtcctcgactctgcttgatttatcgagtttatctagaaaggaccttggtgatctgagagagacgatgttcactcctggtgcaaggatatcaggctttgtttcaccataaacagtagggcctctgctcgaaaatggtgccacgatatcatcgtttgattctggtgtattccggtcatcaaaagcgccaaccgtaataactttttgactgacggcagggctcgcaatcgtttggctgttaggaccagagtttccggcagcgacgcatacaacaatgccttgatcccaagcagcattgacagcgcgcaccatcggatcgtcttgttcgtcatcataacgctgggcatctccgcctagtgacatactcataatatgaatcggatcatcagggtgatcttcattgaactggatgcaccattcaaccccttctataatagtagaaagtgatccagccccttgtttatttaacactttcacgccaattaaatgagcttttggagcaggtcctttgtacaagccatctgaggcagctccgtctccagctacatctccagcgcagtgagtgccatgcccgttatcatcataaggctttgttttttgcttgactaaatccacaaaatcgcgaattcttccttctagatcttcatgcggataaatccctgtgtcaatgacagcgaccgtaataccttcccctgttaaggttgtaccgtttcggatgacttcatcagcatgacttgcttgtgtggccatatccagaagtgcatgaactttccggtctaaataaattttacgaatatgctcaccattcgctaacagctcctctaaagcatccggtgttaggtcagcagcgcagcagtcgatatgtgaaaagtgccgtttaatttttgtttttctactttttttcatgaactgttttgcgctttgaatacctgcttcgaccgcaccttccttaaattcaatgatcacacgaagcttctttctcttctttaatcttccttcaaagaaacgatgaagaaagcatggcgtccatttaaaaggtttataaaggtgaaggacggtttctcttaaaggctgatccagtttactagcatgtgttctgaccatttgcaccatagaaaatccaaacatgtaatgccctccattctagctatccattcttgtacactattacgttatgagaatgagagctgcttggttcggattcatgcccctccttttctttatattggcggctgactgatttctctttaaaaagaaaagcgcttacattttgtaaaataatagaaaaaggtgaaaaacatgtagaatctgccgatgataggtgggagagttcttcaaagagaaccggtgaaacaatcgattttgcagaaaaaaaggggggataaacagggtcaatgctcatacaaatgtggcttgtcacagaggaaaaaaatcaaatccatataaatacaagccgaattaaagaaaacagactggatagaactaggccattttaaacataacttcatttgtctgtcatactattctaactctgttttcaaagaggagaggcgtttctgtgtatataaatgcaattatcttatttttgaggaatctcatgatctagagtgttatgatcaaatttgaagagaaaaagtggaaaaaatgaaaagaaatgatgattcagtataaatcatagaaacggcttagaaatctgttaaaggagaacgggaatgaagaagttttttgctttgcttctcctgcttgcgatcggatggggcgtttattatacaatgcaagcacaggaacatgatgagccagtgtcatcaggtggggaagacgaaagcggttcaaatgatatttatcgcaattttaaagaactggaagaaaacgaatcaccaagcagctatcagattacagccaacccagtgcctggaagccgtcttctagtgatgtcaccccatggcgggaggattgaaggcggcgtgagcgagatcgtccattttttcgataatgatttctctacgtatttgtttgaaggcttaagagagaatgcgtcagaacttcatattacaagcacaaactttgatgagccagtcggcgtcgcgcaggcaaaagcacacgattatatcttagcagttcatggatacaaaggtgaggaaggaattgaccatactctcgttggcggaacagattacgaccgtgcagaaaaaattgtgaactcattagagcggaacggattttctgctgaactggctgtcgcacacgcaaccctgagcggaacaagcaatcataatattaataatcttacaaaaacagggcaaagtgtacagctagagattagtagaagtcagcgtgaagctttatttgacagttttgactttcggcggcggtcgagtacaaaaaacgagacgttctaccggtatgtcagggcgattcggacagtgctggatgaggaatatacataaagatggtgcacatgttaagacaagcagcgtgaattcttgttacactataaaaagtgataataaaaggagagacgaatatggcgcgtcatcattttcatcttcaggcgagctggcctggtctgcgtaacgatgtgggtacaatctcatgtgaacagttaaaaacgaagatttcaattccaaaagaaatggacggtcccggcattggaacaaatccagatgagatgcttttaggtgcagcggctacgtgttatattattacacttgccgctatgatggagcggagccaattagagaaagaggatctaacgatgagttctgaggctgtcgtagatgtgaccaatggtgtgtttacatatgaaaaaatcattcaccggcctgtcatcatcctcaaacaatccgcttccccgcaagatattgagctggcccgcaagctcgcgcataaagccgaaagctcatgtatgatctcaagagttgttcaaggaaatgtggccatttccttagaagaaaccattcaagttggcgggtaaaaacaaaaaagtcattttctcttattaaatggagaaaatgactttttttatgacgtccattcggtttgatcgatttgttctttgttttcttccttttgttttttggacaggttcaagacaatcacgccgcatatcacaagtgcaaggcctatgaagccttttatgtgaatggtttcgttaaacagcacgagtccgataagagcagtgagtgctgttccaacgccagaccatgtcgcataagcagacgaaaggtcaatggttttaagtgccaaactgaggaaggtaaaggcgcagccaaatccgatcaggaccccaatactcggcagcagttgcgaaaaaccttgtgaaagcttcagcatcgtactgccaaaaacctccgtcaaaatggctcctgttaaatagagcattcctttcatgatctcccacatcctttatgacatatttaaaagtacaacccctgagacaagcatcgctatcccaatgactgctctttggttcaaggtttctttgaaaaaaagcacgccaaaaatagccgtgaggactgtaccaaccccagaccatgttgcgtaagacatgctaagcggaatgatgttaagtgtcaatgacagcatataaaatgcaagtgtatagccagcaacaacgacagcgctaggcttaaagcgcgtaaagccatttgagagttttaacatcacggcgccaatggcttctgaaaaaatggccacagccagaaaaagatatccgaggatcatgatcacccctcctctaataggtgtaaaatccgatgaagtaaaagggttttttcttctcgattcagcggttcaagctgaaacatttctgaaaaccatatcccatcacatgcgagtcgaattagctgactcaatgcagggtcgtttatttcctcagctgctttcgctttgaactccgcataaaaatcacgccaagggttcaataacgcttcatcaaatgacatggtagccatcatacttgtacatagctgggtcgtattttgatgatcaagatcatgtaatgtggccaatatatatgcacgtacataaggcgctttttcgtgtttgtaagtttcttgatacgtttcgagctgctgacgaaagcaaagaatcgcgtgctcattcattttttggatgagctcttccttgcttgcaaaatgataaagcaggccggctttggtcatatgtgcatgctctgccacttgctgaagggtaagctggcttaatccttcttctaaaatcgtgcgggcagctgcatcaaagatttgctcttttttggttttagacataaaaaaaacacctactttactgaacggtcggtaaagtaaatgttaacccatcaaaaacgagtgtgtcaatcgattcatttgatgaacaaatattttcactaaaacgtcatatttaataataagggtatggtccatatggcggatacggcggcggataagggtacccatatccatatcctggtgcaagcagagacccagcaagcagacctccagcaaaaccacctaaaaatggaggtccgaagaatccaggtctaccataaccgaatccaggtctcccaaacccaaagcccgggcgtccaaaaccaaaaggtcttctcatgtcttcttgcataaatggctgtgcgtcaaaataattcataaaaaaaggctcctctcacataaaatcactgtaactgacatcagtgtattcgaatggcctatatgtgtttgggtgaatgcctaatataaggaggaatgttaaaaatgggcctgtatccatctgattgggcaaaatgcccgccgcatgctcatgcctataaagcacgaacggatgtaacagaggagcattatcatttaatagaaggcatttctcagcctgtcaatggaagcaatacagatcagcatacacatttttatcgcgggatcacctcttttgagagggggcatttccacagatactacggcatcacagggcctgcgataccgagagtggatggtacgcactatcacgagattgaggaagtcacgttttctgcctataacgattctgtccctattccgtatggaggagtcgtctatagtccggacgaagagcggccaacgcatacgcaccgtttaaaaggaaaaacatacgaagtggtcggaaatgaaccactcggctggtgataggccctatataggagagaatgagaagttatgctatactgtaggcagtttgtaaaagagagtgatgttatgaaaaaaacgaaacaaccagtgattgtattagtaggaccgacggctgtcggcaaaacaaaactgagcattcatatagccaaagcatttaatggagaaattatcagcggtgattctatgcagatttataaaggaatggacattggaacagctaaaatcacccctgaagaaatggatggtgtcccgcatcacttaattgatattaaagagccggacgaatccttttctacagctgaatttcagcagctggtccgtttgaaaatcaaagagattgccgctagagggaaaacacccatgattgtcggcggaacaggtttgtatatccaatctgttttatatgattatacatttaccgacgagaaaagtgatcctgcttttagagaagaaatggcgctgtttgaacagcagcatggcccccttcagctgcacgaaaagctaaaggcagtagaccctgatgctgcaaaagccattcatccgaataatgtccgccgcgtgatccgggcgctggaagtgatccatacaacaggtcagaaaatgtcggagatgcaaaacggtcatcaagaagttcctctttatgatacagccttcattgggctgaaaatggatcgagagcttttgtacgagcgcattcaccaaagaattgatatgatgatagatgaaggcttaattgaggaagtgagcgcactttatcaatctggcttgaaggattgtcaatcggttcaagcgattggttataaagagctgtatgcgtattttcaaggtgactgctcacttgatgaagccacccggcaattaaagcaaaattcccgcagatatgcgaagcgtcagttcacgtggtttcgtaataaaatggatgtcacttggttcgacatgacaccgccttgccacttttcagacaaaaaagaggaaattttcgcatatatagcaggaaagcttgaacttaaagcgaaactgtagttatcagaatcaaggaggacgaaacatgaaaccgattaatattcaggaccaatttttgaatcaaatccgtaaagacaatacctttgtcacagtattcttactgaatggctttcagcttcgcggtcaagtgaaagggtttgacaatttcacggtgctgcttgaaacagaagcgaagcagcagcttatttataaacacgccatttctacatttgcacctcaaaagaatgtaaatctagaattagaataggatatgttcgacctaatagccccatgcatctgcgaataaaccggccggaacccgctacgttttttgtcagtgcagaggggctattttgcatgccgtgaaacttttctgtctattttacgtataatcccttattggatatgaagaaaggtgagggaagcgatatggaaaatgcagagcttgaattaagaaggattagagtgatccttctattgattgggattgttgtcttatttggatcgtgcgccatttcaaacattgaatcgagacaggaaagctcgcataactatgctaatcaagatgataatggacatatagaaggccttttacaatcagctgttgcactaaaaaataatcactttgctgttgtgaaagatgatgaagtacatgtgtaccggtttgatgaaaaagagggagaactgaccctcgttaaaacgaagtacatagatgaatgggacgaggaatatgatgatgattctgttgaagagtaagcacgtaaatttacaaatgaatgtgaagtcgctacactataatcatgcatcagacatctagacagaaaaggatgagttcatgacacacaaaattaaaattaatcactgggaacaaacttgtgaagacgactcctgtttcgaatatggaacaagcgtttctgtaaatgggaaagaattagtcagagaagcttcaatcgtctctgcgcttgaagcggtgctaaaagaattaggtgttgaagtggaaattacagaagtgtcagaagatttacagtgcgatgcctacaaaaaataaaacaaaaagtctagtctactaagcgattttttttcgtgttatgatagatttcggtttcagttgaatagggagtagagcagtctatttttagatcctgttctgctctatttatttgaacgtacgagttcggctatgaatgttcggccgggttggttgatttttttcgtttcgaacatctatatgttgtgttttgaaaaaacatagtatactatatatagtgaataacgaaatgatcaacaatactaaaaactaggtcgtgatggaattgattcaaatcgtatttgattcaaaaacaggaaatgttcaacgctttttggacaagaccccttttacagacaaacgaaaattgactggagaagagtttttggatacgccgtttattctcgtcacctttacgacaggatttggacaagtccctagtaccactcagtcctttttagagaaaaatgctcaccttttactaggtgtagcggtgagtggaaacaaagtgtggggagataattttgccaaaagcgccgatacgatttctaaacaatatcaagttcctattttgcacacctttgaactaagcggaacaaaaagggatgttgaattgtttacacaggaggtagaaagaattgtcacaaaatcaggttccaaagtggatacaattaaataacgagattatgattcaaaaagaaggaaagtttcagtttgataaggataaagaagctgtacatagttatttcgtagattatattaatcaaaacacggtcttctttcacaacttagaagagaagattgattacttaatagaaaacgactactatgaggaagaatttttaagacaatacagcatggcagatattaaagaagtattcgaagctgcatatgcgaagaaatttagattcccatcattcatgagtgcgtttaagttttacaacgactatgcgctgaaaacaaatgataaaaagaaaatccttgaacgctatgaagaccgcatttcagttgtagcgcttttctttgcgggcggagataaagaaaaagcacttgagtttgtagaactgatgatcaatcaggagtaccagccaagtacaccaacattcttaaacgctggacgtaaaagacgcggtgagcttgtgagctgtttcttgcttgaagtgaatgactcattaaacgatatttcaagagcgattgatatttcaatgcagctttcaaaactaggcggcggcgtcagtttgaacctgtcaaaacttcgtgcaaaaggcgaagcaatcaaagatgttgaaaacgcgacaaaaggtgtcgtcggcgtgatgaagcttcttgataatgcattcagatatgcagatcaaatgggacaaagacaaggatcaggcagtgcctacctcaatattttccacagagatatcaatgatttcttagatacaaaaaaaatctctgctgatgaagatgttcgggtgaaaacattgtccatcggtgttgtcatcccggacaaatttatcgagctggcaagagaagataaaacagcttacaccttctatccacacacagtctataaagaatatggacagcatcttgatgagatggacatggaagaaatgtatgatgagcttgtagaaaacccggaaatcaaaaaagaaaaagtcaatccgagaaagcttcttgaaaaattggctgttcttcgctcagaatcaggctatccatatatcatgttccaagataatgtgaatagagagcatgcattaaaccatatttcacgagtgaaattctcaaacctttgctcagaagtgcttcaggcttcagaggtctcttcttacacggactatgatcaagaagatgaaatcggtcttgatatttcttgtaatcttggttcattaaatatcatgaatgtcatgaaaaacaaatcgatcgaaaaaacggtcaaacttgcaacagactcactaacacttgtgtctgaaacaacagacattcgcaatgcaccggctgttcgaaaagcgaacaaggcgatgaaatcaatcggacttggcgcgatgaaccttcacgggtatttggctcaaaaccaaattgcctatgaaagtgaagaagcaagagatttcgcgaatacgttctttatgatggtgaactattattcaattaaacgctcaagtgagcttgcaaaagaaaaaggagaaacattccatcgttatgaaggctctggctatgcaacgggtgagtacttcaataaatacgtggagaatgatttcacaccaaaaacagaaaaagcagcagcactatttgaaggcatgcacattccaacaaaagaagactgggcagcactcaaagactttgtagcggaaaatggcatgtaccatagctaccgcttatgtattgcaccaacaggttccatttcttatgtgcaatcggccacagcctctgttatgccaattatggaacgtatcgaagaaagaacatacggcaacagcaaaacctattacccgatgccaggtctttcagcgcagaactggttcttctataaagaagcgtacgatatggacatgtttaaagtggtcgatatgatcgcaacgattcagcagcacgtcgatcaaggaatcagctttacactattcctgaaagatacgatgacaacgcgtgacttaaaccgcatcgatctgtatgcacaccataaaggcattaagacactttattatgcaagaacgaaggatacagggcaggaaggctgtctttcttgtgttgtttgattaaaggagagtttaacgtgacaaaaatttatgatgcagccaactggtcaaaacacgaagacgattttacacaaatgttttacaaccaaaatgtgaagcagttctggcttcctgaagagatttccttaaacggggatctcttaacatggaaatatttaggtgaaaaagagcgagatacgtacatgaaggtacttgctggcctgactttacttgatacagaacaaggaaatacagggatgccgattgtggctgaacatgtagacggccatcagcgtaaagcggtattaaactttatggcgatgatggaaaatgcggtacatgcgaaatcatactcaaatatcttcatgacactcgcaccaactgaaacgatcagtgaagtgtttgaatgggtcaagaaaaataaattcttgcaaaagaaagcagatatgattgtcagtttataccgttcgattcaaaaggacgatccgatttccctctttaaagcaatggttgcttctgtttatttagaaagcttcctattttacagtggtttttactacccgctttatttctatggacaaggaaagctcatgcaaagtggtgaaatcatcaacttgattttgcgtgatgaagcgattcatggtgtatacgttggattattagcacaagaaatttacaacaaacaaacacctgacgtgcaaaaagagctatacgatttctcaattgacctcttgaacgagctttatgaaaatgaacttcattacacggaagatatatatgaccaagtcaatttatcgcatgatgtgaaaaagttcattcgttacaatgccaataaagcgttaatgaaccttggatttgccccttactttgaagaagaagagatcaatccaattgtattgaacggactcaatacaaaaacaaaatcgcatgacttcttctcaatgaaagggaacggctacaaaaaagcgacggttgagccgttaaaagatgacgacttcttctttggagatgaatcataagtaaggcgtaaaagtcaaaacgcatcactcgttttggctttttgccatttcatacaatgcgttacatactggaggttaccgaacatgggaaaaatggatgaaatcatactagttgcaccgcgcgcacgcgtgttccaaaacgaaacgcttgcgtttaatggtgtgaatagtgaagagaaaacaatcaacaccattatgaaagaaatcgaagagcacttcaagcagatgcgcagaggcgatgcggaagaaaatcctgacttcaagcagccgattccttatgtcgtgattaagcgtgaggacgaagtgtatgtatatgaaaggcttcaaggcgggggagagactcgattgcatcataagttatctcttggctttggtggtcacatgaattttatcgaaggaaaaaactttgctgaaattctaaaagaaaatacggatcgtgaactagacgaggaactttctattcaagaagaagacaaacttgagatgaaaacccttggattaattaatgatgatgacaacagtgttggccgtgtgcacattggcctgttatcagcgcttgaattatcttcaggtgctcatgtagaagtgaaagaaacagatcaaatctcaggaaaatggatgaaagcatccgatttgaaaaagcccgaatacttcgatcgacttgaaacatggtctcaatttgtcgtgaacattttagcataaaagaatcaatcataaaccggctcagcggcagacttgagccggtttatttcgttataacagcttcagttattggaaaacgaatgcgtcgtgaccggcctgtttcaatcttgcgacgaggtcatccgcattttgctttgtacgaaaagctcctgcttgcactcggaacataccgccctctaatacaacgaaggcgtcaaagccttttgatttcagcgtggctgctaattcatctgcattggctttcaccttgaaagctccagcctgtactttataaagattacctgctttttttttcagctgaaaggctttctctaatccagtggcatgagcgcgagcgatgccttgaaggaaggtcgcattgcggagcttatttgcatcagctgtcgtatcgatgaaaccattctctgttaaaatagcgggcatagaagtttctcgaagaacgtggaagttcgctgttttcttgccgcggttggcaaaatccaccgagcgaacaatttcatcatgaagggcattgcgatacgtggtggtcggtgctgaaacgccaggatacacaaagctttcaaaacctgtgcccccgcctgcattaacatgaatagacacgaaatagtcagctccccagctgtttgccgcatttgtacgctgggacaaagtgacggattggtcaattgaacgacttaagcggacggaaaccccatcatattcactaatcatgatatctctcagtaaaagtgcgatttgaagtgtgatgtttttctccaaaagtccattagcagcagctccagaatctgttcctccgtggccaggatcaataaaaatcttcaccatctattcatcacctcgtctttattttatgagaaaatagaagaattgcctgtacaaaatgcggaaatcattgagactcttttctgcataatttgtgatgagaaagctacatttttctaagaaaaagcaaattgttggtttgtccgcctaaattggatgaatacaatggaaatagcacatcatttcctgggaaaccgcagaaatccctacaatattcggtatctcgggtcattttgacagcaaacttgggcttaagcgggcgattgtcacgattacagctccacccgaatagaataaagagagaagagcgagaggtgaatacgttggagcgagctgtcacatataaaaacaacggccaaatcaatattatacttaacggacaaaagcaagtattggttgatgcagattcagaggcagaatacctagaagccttgcagaaaaatgaggcaaaacacagcatcttacgggaaatagagcgtgaaatgaacagccttgttggtatggatgaaatgaaacgaaacataaaagagatttatgcttggatctttgtcaatcaaaaaaggcaggaacaagggttaaaggtaggcaaacaagcgcttcatatgatgttcaaagggaatccaggcacagggaaaacaacggttgcaaggcttgtcgggaagcttttctttgaaatgaatgtcctctcaaaggggcacttaattgaagcggaacgcggagatcttgtcggagagtacattggtcatactgcgcaaaaaacaagggagttaattaaaaaatcactaggcggcattttgttcatcgacgaagcctattctcttgcccgcggaggcgaaaaggattttgggaaagaagcgattgataccctagtaaaacatatggaggacaaacagcacgaattcattctcattcttgctggctactccaaggaaatggatcattttctatcattaaaccccggcctgcaatcaagatttccaatcaatatcagctttcctgattatacagtcgatcagctcatggacattgccaaacgaatgatggctgacagagaatatatatttacgcaagaagctgaatggaagctgcgagattatttaatgcacattaaaagcaccacaagccctgcaaaattcagtaacggccggtttgtgcgaaacacgattgaaaaggccattcgaactcaagccatgagacttctgcttgtggatcattatgataaaaaagatttgctcaccattaaaagtcacgatctgcaaatgaaagaggatacgcctacttaaaatggcgtatcctttttataaagagatactaaaataaaccatccgaatagtggtatacgtgtgatgtgtttggtatgatggtactactgaaaacttaagtacagaaaggaaacaactgacgttgaatgaacatgaaatgacagaaaaagcgatccttgtcggctgtcaattgccgcatgtcacggatgaacgctttcaatactcaatggaagaattagcttccttaaccaaaacggctggtggtgaagctgtcagcgtaatgatgcagaagagaaatagacaagacagcgcaacatatatcggtaaaggcaaagtagaagagcttgaagtgctttgcgaggaattcgaatgtgatgtcattatttttaatgacgaactgtctccaagtcagctaaaagctttggcaactgccttagatgtgaaaattattgatcgtacacaattgattttagacatctttgcaaaaagggctcgtacaagagaggggaagctgcaaatagagcttgcccagcttcagtatgccttgccgagactaagcggacaagggatcagcctctcaagacaaggaggcggaattggcgcaagaggtccaggtgaaacaaaacttgaaacagatagacgccatattcgaaaccgcattcacgaaattaacgggcaattatctacagtcaaagaacaccgtacaagataccgggaacgccggaagaaaaatggggtgttccaaattgccattgtcggatatacgaatgctggaaaatctactttgtttaatcaattaacagaagcagatagtcatgaagaggatctactgtttgcgacgcttgatccaatgacacgtaagatgacattagcatctggctacagtgtgctgatttcagatactgttggctttatccaagaccttccaacaacactgatagcggcatttcgttccactcttgaagaagtgaaggaagctgattatttgcttcacgtcatcgattcttctaatgaggattacgaaggtcacgaacggacggttcatgagcttttagaggaattagaagcagatcgtattccaatgctgacggtttataacaaagaagatcgaatcagaccggatttcatcccatcttcaaagcatcgtcatctgttaatcagtgcgagacgcgaagaagatgtgaagcggttaaaagcggatatcatggctgaactgaaaaaaacctttttaaagccatatcatgtgaagattccagcgtatgaaggaaagctcatctccgcattaaaatcagaaacgctcgtggaatcactagaatttcaaaaagaagcagaactttatgacatcaccgggtttagtggtgaggagcagaccatattaggtcaaatcaagaagtatatgttgtaagaaaggaattaaatcaagatgtttcatacattaaaacacggcagtattttagaaaaagtagcagcagaaacagaacaagacattttacacgtgcatcagcaaattgatcaaaagagcgaacaaaatgagtggcgggtgcttgaaagctaccgaaagcataaagtcagtgactctcactttaacccgacaactggatatggctacgatgatatgggaagagacacgttagaaaagatctacgcggatgtcttcggaggagaaagcggccttgtgcgtccgcagatcatttccggcacacatgcgatttccattgcgttatttggtgtgctgagacctggcgatgaattgatctatatgacaggaaaaccatacgatacgctagaagaaattgtagggattcgcggcaaagaagggacaggctcattaaaagatttccagattgattacaaggccattgatttaaggctagatggatcagtcgattatgacaaagtaaaagagtcgatctcctcgaaaacaaaagtcatcggcattcagcgttcgaaaggctatgcttcaagaccctcctttacaatagaagaaatcgagcaaatgatctcatttgtaaaagagatcaatgaagaaatcattgtgtttgtggacaactgttatggtgaatttactgaattacaagaaccatgtcatgtgggagcggatcttatggcaggttctctcattaaaaacccaggcggcggccttgccaaaacaggcggctacatcgttggaaaagaaaaatgggtagaagcttgctcttatcgaatgacatctccgggcatcggcagtgaagcgggtgcatcgctgtatgcgctccaggaaatgtatcaaggatttttcttagcaccgcatgttgtggcgcaaagcttaaagggcgcagtgttcacggctcgttttcttgagaagctcgggttccaaacgaacccagcgtggaatgcgaaaagaacggatttgattcaatcagtcgaatttggcgatcctaacaaaatgattgcgttctgccaggcgattcaatatgcatctccgatcaacagtcacgtcacaccgcatgcgagctatatgccgggctacgaggatgatgtcatcatggcagcgggcaccttcgtccaaggagctagcatcgaattgtcagccgatggaccgatcagaccgccttatacagcctacgttcaaggcggactcacgtatgcccatgtgaaaaatgcgatttgcagtgctgtagatgccttattggaacaaggttttatcgacatacctgctcaataaaaaaatccatgttaatattcctaacatattgttgacacataatataacatgacatataataaatttaagcaaagaggaggagacagttgagatgagtgataacattcgccgctcaatgcctttattcccaattgggattgtcatgcagctaacagaattatctgcaaggcaaattcgctattatgaggaaaatggattagtatttccagcaagaagtgatgggaatcgccgattattttctttccatgatgttgataaattactagaaattaaaaacctcatcgaacaaggtgtaaacatggcaggaatcaaaaaactttttgccaaagctgaggcagaacatccagcgtctaatacaaaggccgaggagaaaaccacagccaagcacaacttgacagatgatgaactcaggaagctactgaagaaagaactcattcaggctggacgtttccaacaaggaacgacctttaggcagggggatatgtcaaggttcttccgttaaccaattagcaaaagcattgctatacaattttaccttttgtaggggaggagttttacgaaatggcaaaatacacaagagaagatatcgtaaaattagtaaatgaggaaaacgtaaagtacattcgtctgcaatttacagacattctcggaacgattaaaaatgttgaaattcctgtgagccagttagaaaaagctctcgataacaaatgtatgtttgacggttcatctattgaaggcttcgtacgtattgaagaatcagatatgtatctatacccagatctcaacacatttgttattttcccttggacagcagaaaaaggtaaagttgcacgctttatttgtgacatttacaagccggacgggacgccatttgatggagacccacgtaataacttaaagcgtgtcttaaaggaaatggaagaactaggatttagtgatttcaaccttggacctgagccagaattcttcttatttaaattagatgaaaaaggcgagccaacgcttgaactaaacgataaaggtggatactttgaccttgcaccaacagatctaggcgaaaactgccgccgtgatatcgtgcttgagcttgaagaaatgggctttgaaattgaagcgtctcaccatgaagtagcacctggacagcatgaaattgatttcaaatatgcaggcgccatccgttcttgtgatgacattcaaacgttcaaactcgttgtcaaaacgattgcgagaaagcacggtcttcatgcgacattcatgccaaaaccattgttcggtgtaaacggttctggtatgcactgtaacctatcattattcaaaaatggcaaaaacgcattctttgatgaaaaagcagatttacaattaagcgagactgctagacactttatcgcaggtatcgtcaagcacgcaacaagcttcacagcggtcacaaacccaacggttaactcttacaagcgtcttgtacctggttatgaagcaccttgctacgttgcatggagtgcacaaaaccgcagtccattgatccgtatccctgcatcacgcggcattagcacacgtgtagaagtgcgcagcgttgacccatctgcaaacccataccttgcactaagcgtattacttgcagcaggtcttgacggaatcaaaaataaactagacgcaccagcaccaatcgacagaaacatttatgtcatggacaaagaagagcgccttgaaaacggcatctctgacctgcctgcaacacttgcagaagcacttgagttgctcaaatcaaacgaagtcatgatcaacgcactaggcgatcacctattcgaacacttcatcgaatcaaaagaaatcgaatgggatatgttccgcacccaagtacacccatgggaacgcgatcagtatatgtctcagtattaataaataaaaccccttggagccattggcttcagggggttttattttggtcaaattatattcagaaaagaagaaaacgatgtgtaaacctatgtttaaaaagagaattagtgttcctaaagaaactgttttaaagttgtttctacgccaccaacttcaatatcacttctaagcaattctttatgttttgaagcagcaacttgcgcttctttttgtactaaattcacctttagaaagctctgttacttcttgtgttacaggatccatatgtttaattctgtactgccatgtcgttcctcttttaatgcactctacataaaacataccttttatagataagtatttttgcattttgcgggataccgaaaacttttaaaatgaacacttcgactttacatatgttgtaaattccatgttaaaattatacaaaggaaatgatagcaagggggtaatgggatgtcaggtttgatctcctctgtagatgtagcaaacactctcaacaaatggtatttacatattaaaaagagggaagtttcacaagcagtagagttgagggatgagattcaagaaatgttaggcgaaatggaagaaaatcaagatgttttactctatttcaatattcttgattatagatttaaggtactgatggaagatttagtggggcaaccaacaataacagaaagtgaaagagtcaaaacagatgacatgctaaggttttacttttatcttttcaaaggtatgtacgagagtgcaaagaataattattcagaagctctagtcctatttagagtggctgagagacaattggacaaggtacatgatgaaattgaaaaggctgagttccattataaaattggcacactctactatttcaataaggtcacgctcctttctcaccatcatctacaaacagcaaaggacatctacaaaggtcatgaaggctacagcatacagaccataaactgtaatatgttgctggcattaaatttgattgatgatggtagactagacaaagctgaaagaatgcttttggagtgtgttgatagactgattgaaaagaatgataagagattattagcgttggcttattatgatttaggatttctcaaaattcaggatgaccaccatatagaagcaatagaatatttcaacaaagcaatttccgcagatgatctaaaacagtcagctcctgtttcatacttacaatgtgcgtatgaatttgcaagatcaagccataaatcaaatcaagtggataaggcaataagttgggttgctgaggggaaatccttttctaaagatcagcagaacacaaactttattttgaaattcaatatccttgagaaatgttatacaacaccacaggaaagctatgaagatatcaagaaagggctatgtcttttggaagaaaggaaagcatatgttgatatagaggctttagctcctgatgttgcatccatttataagaagttaaatctttatgaagaaagtaactacttcttggaattggccttaaaatcttgtacgcttataggaaaggaggtcatatgatcatgaaaaaaataatgatgatgattactactgctttgctattaggtacaattcttggaatacctgttggacaacaaactcaagcagatgctaaaaatgaggtagtgttgcttttctcaagaggtgcaggatcataaaagcgtaggattttaatccaccactacggaggataattggtttaaaaacgataaagtggattaaagtgtcaggctccttatggtattctagtaaaagaatattccataaaaggagtcttttttatatgaaaatattagatgctccatctttactatcagctgtcgaacagaggtcaaaggcctatcatgagcttcaagaagaaatgaaacttgtgaaaaaagcattaaaaagtgtatcgggattaggtgacgagtttactggaaaaggtgcagataatatcaaagctttttataatgatcttgcactatacacggacacttatcttgattttctcgatatgcaaaaggcttttttagatggagtgaaaggaaagcttgatgatgaatcattaggcgggagtacatttattgatgagcacttcttagacgctcaattgaagcaaggcattcagaacaatcaagatatggtcaaggaacaaaaagaagctcttacggcaatttttgacgatattagtgatttgattgaattgcagacattttccagtaaaaaagtagacgagcacttagatgatgcgaacaaaaaaagaaaagatgcaattgaggctatacatacattagatcatgccctaaaaacagaatacgcaaaatcagaagcgattgagaaacatcttgcaactttttatacaaaaatgatggctgctacaggaaaaggaaagaacgctcagcccatgtattatgatgcaaaagcatttcatgagacagatgtgtacaagaatcatgataaaatcgatgctcaggtgaaagcgtatttaaaagtgaaaaaagaagaaaaagagaaacgaagaatcaaagaattgaaagaaaagctcaatgatccttcgtgtatatcagtagagaaatactttgagattgtagacgaaattggatatgaaaatctttcttacgatcaaaaaatgtattacagccagctgctccaaatcaaagcgcaggaagaagcatcagaggtatttgttgatagtgtaaaaggtgctgcagttggtctatatgatgtggcaaaagatacagttgttggcatctacgatcttgtaacagaccctggaggtgccgttgaatcagtcgtaacggctgtttctcacccaattgaaacatcgaaagcgattggaaaatcaatttcagactcattccaaaaagaagtcatagatggtgatgcgtattctcggtcacactggtttgcctatgcgactggttctttagcagaaatcgtctttggttctaaaggggcaggagccattacaaaaacagggacaacagcggccaaaactacggtgaagaaagggcttgaacaaggagtaaaatcattagataatgtctccattccgaatctattgccatactcaccaaagttccaaatagctggtggagggaaactaccgtataacgtttttgacggggagaatatcaaaaataaactcctttccatggcaaagcgtctagacaacaactcaggatacggcatctctcagacaggtagacgcttaccagcaccaaaatcaccgccaaccgttgtaagttacggagatcactatgtaaggtggaaacgcaaaaaagtattaaaaccaaatgtcgtttattcaacaaagcaagggtacacctacacaaccgaccactacggaaggattgtcaaagtcgaagcaagtgatttaaaatacggagagatcaaaagaaaccaatacgctcaatccaattcaggaaagcctgacagattactagatgatgatggtgggcatttaattgcttcaatttttaaaggatctgcagatattgataatcttgtgccgatgaatgggaatttaaacaaaggtgagtggaaaaagcttgaaaatacttgggctgatgctcttcaaaatggtgatgaagttaaagtgaagattacacctaactataaagcggattctctacgcccagaaacttttgatattaaatataaaatcggtgatgatgaatgggaaatcaaaaggttcgacaatgtgtatggaggtaaaaagtaatgaatgaagaaaaaatagaacatttgtataaagagatagttgatgttgtagtgggaacaataccaattgaatggggaaaggtgtatttatatggtgaggtagttgaaggttctcaaactgtttacttttatttttcatctaaagaaaatgagggtaaactggtatatagtcatgagatcactgaactttttgaagtgagtgaacatgaatacaaagaaagatggcatcaattagttgactgtatccaagaacttaagagagagtttgaacaaaatggtcaagaaccttggacaaacttcacaatgatatttgatgaaacggggcattttaatatagaatttaattatgatgaccttttgaatacaaaccctcatgaaagaaaaactatttggaaatataatcatctaggtattatacctaaaagtaattctggtaaaaaacatttagaaaaatacttctctacattggagtaacttttagagatgttataaaattcgttttgatagattaaagaaataaagactagagaacatattgagagcatcattccaagcagaaatggtgctcttattcaataatgccccctattaatcaataacaaaacagacacacttagcaacaaaataaaaatcaatacatatggaatcaactgtgtattgattagcatgtcaaagaaaccgattcacgaaagcaaaaatatcgaaaaacacaatattcttttctaattaaatctttcttttcactttatcgaaaccaataaaccgtcacttcacaatcacccaatacctcttcaatcatgtcttcaacaatcgtccaatcgccgcccgccagtccgcagccgatcccgtaaggaatggcgatggaagttcggtttttctcttcatgtgaatgggttactgtgtcttttaggctttgtaagcagctgcgtaaggcgtcgtaatcagtttgcattctttttcttccgtatccagtttgagcaaataagttggcaattgtttttccgtcattagttgtgatgagttgaacggagcttaacaagtcatctccttgttctgtacataattgtttatactctttgtatacattggggtatttgcttttgatttgtttggctaatccagcgcccatgacccctttacagttcacctggtgacagatgatgtcttcacttgcctctaaaatgttaccatccactgttttgatcatatcaagtaacccctttttaataaaataaatagaaacttatgttctattttatcagttttgatcaaattatttaatagcaaaaatgctttttatgagtttcgtttatttgaagacacttcacaacaacttgattgtcaaagctggtgcatgtcatctaaaatatggagagactagaaaacacgaaatgatgcaaagaggagtcatttatgaatcaattagaaacgaatcgtttaaatcttagaccgttttgcgatgaagatgcggcaggggtgctggagtacttgtccaatccaagagtaaattgttttcttagtgatcgaattttttcattagaagaagctgtggctaaagtgcaaaagagaaaagaagatcattcatatgtagcggtttgtttaaaagaaagtcaacaaattatcggtgagttgtttcatttaaaagaggagcctgatacgtattcaatcggctggaatttcaatgcagcatatgaaggaaaggggtatgcacgtgagagtgctgaagcattcttgacctatttatttgtagaaaagggagcaaggcggctttatgcctatgtagaagatgataatgtccgttcacaggcattatgtgagcgattaggcatgcggaaagaaggcctttttcttgagtttatttcatttactacttatgaggacggcacccctaaatatgaaaacacgtatcaatatgctttgctaaaaaaggaatgggagcagcatcactctctatagagcactcagtgaatgatgtgcaggtgacagcaaagtgacaaacatgtcatatgattccatggtttgttcgttcgatcgatggagcggtcatctcatttcaattatccttgtcataaatcgaggaaaaagggatgaaatgagatgcagggatataatgaagatttatttaggtgggtgaatcagctcagtatcgatcatggttacttgaatccgttattcattggactagctgaatatacagtgctgttagcagcgctcatgtgtctgttcatatggtttcaaaatcggagcagaaccaataggcgggtggtcgtatctgccggatttactttcatattggcagagttaattggcaaaattgcaggaattttttattccaaccagcagccctttgccgaaatgagtcatgtcaatcttttgattcaaaaggaagtaaataactcttttccgagtgatcataccatctttattttttctgtttgtctgatcttttggctttttcacaaacgccatgtttattggctgatcattgcgtgcgccgttggtttttcaaggatttgggtaggtgtccattatccatttgatgtcttagcaggtgctgtcatagcgtgtttaacagcggtcgctgttgtatatttgccgatatgccaaaggagcgttaataccattttgtcatgttatgagtggcttgagcagaaagttgtaaggaagagaacaaaataacatgttgcagcaaaataccccgatctgttaatggctcagatcagggtgctttttattttcgccaaaacgttgaacaatccgctttgtcttcgatattaaattcgatgattttttttaggagaggataatcaactggcaagctttccttcatgcgaaacatcttttttccatgatcgtaacccgcttgtacaatgtcagctgaaaagtgatcgattcctttaccttctggtgcgacagaaatgtgatgttttgctacgctaaacccaataataaatgtgccgtggtctgtgaacatgggctgattccaagcaattcttggctctaattgagggaatgtgtctaaaatccattgtaaaatgtcttgtgtgcgctgcttcagctttggattaccgatattgcttacatattcttcaaacacatgcatgatgttttatcctccaattccatcgacctcatacgtctcagacgggattcgaacccggtaagcataggttaggggcaacacgcttccctacggaatttcacctgtctcagtgtgctttttgatgcttctgaaacccttaccttgcggcccgccagctataattcgttttacagtgctctagccttctagagctgctgaggcgcggaagttattaatcttattatatatagtaaaatgttaatagggttattgtaaagaaaaacctatgtataaagagattagggagattaaaccaaaatatgctccaatattaactattacaaggtatataatgaaatcggtatgagtgaaagattgtatacacgtttaaaagcaaagactttcctagacctggattatgctctcaatgaggtttaatttaaagcacccgtttagaggagtttgactttgaagtaaaaaacgaccccaaaattggaagtcgttttgtaaatatttttattttgaaacaaagcattttccattagataatacttcgcattttacaaggaaataactgttactacttgtccaaacttgagtgtaacttaccccattttgtttaattaatacgtaatcccactgatcaggataagcatctctgacccactctaacggagcagcacttgcagtattcatagaaaataacattgttgcagaaaaggcgatagataatacagctttttttaatgttgattttttcaaacaaaacaactccttaatttgaattaacctattatttgtaaataagttaattcaatagtatcaaagagaaaaagcattttgtgtcgaattttgtaaaaataccttaaatttacctatttatataaggtgataattttcacaatgtatgaataaaccttttaacactttaaaaggtgtattgatttgtttttttatttgcgtataactggcgtcgttttttgcggagcatgacgtaatatcgtattatgcgatagattaattgaatagcttttaaaagtgacttttcgttcggtaaattttgcgattagttccatgggttctctttctgccgctgatctttacgcgaatcgcacaaaatagtcaagggcacatatgataaaagaccatatggatttgtatacagcattgaattgggctgatagaaagtgacaaacctgttgatgagtaaactgaaagagataatcaatcaaacaaaaaatgaaggctttactcacaaacgttcaatgagttctccttttttgctcatcatggaaaatggggaacctttctactcctgggtgttcgttgaaagaagtgtgtttaagacttgctatttttctttgatttccatcaatgaagaacagaattgtgtggtattagagctccttgttccatgctgcatgaggtcgacttgctgtcagaaagtcttgtatcgatccagttcaaagatccttgttgatctttcttttttatgcggaatgattgaagcagagctgccagtatatgatgcgctcattttaaagaacatagaacctcaccacctccttcttgatttttcaacatctcccagttcggttgaaatctggcgtaatggaacaagattactaaatacagcaacagtggttttgcatcatcatgatgatcaagaagtgccagtttctatcaccattcaaacaaaaaaagcatgtcatgacatatgtgtccaaaaaggagaaagtcgatcgattactgtaaaagatatgatgttgattttaaagaaacaagccactgaaaacgtgcaagcgcgcttagacattcaattaaacatggtacaaaggaaaaaaataaggctttgagtctgggataatcgcacaatcttcatagatcactagatcatagtctatcaagaataggttgaaggagggttaaaatggctattttaggcgggtgtagtaatgagcgaacaggctttgtgaatgatgcggtatgcttcacagtcgatttagcagcagcagcggatccagttgtcgtctggacggatggaacaccatttgtcataaacgggaccattatggtggaaaacaacggaatcgtggctgtagcaccaactgtgacattagaggtcaacggtgcggctgttccagatttcactgtacctccaggagagagtcgatccattacgctcagcgatcttaactccattgggattgtagctactggcgggacctcgactggaagtattgtcgtttctttttctctcaattatcagtattagtgtgtatgtcttaaagattccacagtttgaaagaagtgagaggcatgtgcgcccaacttaatatgtgtggaggaataacaggtccaacgggagcaaccggcccgaccggagtaaccggaacaacaggatcaacaggcctgaccggagtaaccggaacaacaggatcaacaggcctgaccggagtaaccggaacaacaggatcaacaggcccgaccggagtaacgggtccaacaggatcaaccggcccaacaggatcaacaggatcaaccggcccaacaggatcaacaggatcaaccggcccaacaggatcaacgggagcaaccggcccgaccggagtaaccggagtaacgggagtaacgggttcaacaggatcaaccggccggaccggagtaacaggtccaacgggaataaccggaataacgggtccaaccggagtaacgggaacaacaggatcaacgggcccaacaggagtaacaggtccaaccggcacaattgtgaccgctaactcaatgtacgcgtccaatacgtcgggaagtacagtgcttgttgtcataggcgggacagcggtttccttgcctaataatcagagcttagatggttttacggcaagtggtggaaatacgatttttacagtgcctgtctcaggccgctatttcatcacatatcaagtgaacacaagtgtagccctgcttgccggaacaaggatcattaacagcggatctgccattcctggttctatattaacacccgctttatcggcatctacctacaacgtatcactcattacaacacttgcagcaggtaaccagatttctctccaaattttcggtttagtcgcaacaatagtgttacttgggggaggatcggttggagcggcacttactattatacgattggaataaggacaaaaagcccaaaaaagggcttttttcatttcatcacgagatgattgggtactttaaaaccgaaaaaaggtgaaatatttacgcaaacatcattgactagaagaaagaaacgcattttcaatggaaacggttattgaagattcaagtgattcatattaaaatgatctcaaatggactaattagcaattgctaatagaagttccatatttagtgaaatcatgtgatgcagctgaaagtgattgggggtgtagaatgagcaagattcctgttgcggaattggcatcattattaaatgactggaacatggaaatcaaaaaagatcatgcagatgaggcagaacggttatttgctaaagcgaaacaagcggtagaggaaattgacgatgcggacatccttatgtactattctcttcttgagaagaggcatcacattctcatgtacaatttaagagggcaaaagggcagtgtttcaaccagaagtatagaaggtcatcacggaaaaaaagaggatgacttgtctaaccgacttgcctactattttgatttttatgagggtgtgtatgagcagcatcaaggaaattacgaggttgcattgcaaatgtatcaaagtgctgaaaagctcttagataaaattccaagtgagatcgaacgtgctgatttcgattttaaggtggcctggctttactaccggcttagtcatatcatgctctcattaagctatatccgcagagctcttcacgtctataaacggcacaagcattatgaaagaagaacggcactttcatactctctcattgcggcgaatcaaacagagatcggccggtatgaagaggcgcttgaaaattatcgtctggcggaagaggttttgacaagcgagcaggatgactttatgctggctcagctccatcacaatgtagccattttatattcattttggaacaaaccgaaagaatcaatacgtcatcttgaaaaagcactgtcccatcaagaatattatgagtcggatttctttttccattctacgtatctgatcagccgggaactctgtgtgattggtgaaaagcagcgtgcaagccaatatatagaggctgcgtatgccagaataaaagatgcttctcatgaagtgtttcagctgaaaataggcatcgtccatgacctttacttaacgaatgcaccacaaagatttcagcaaattgataagaaattaagaaagttagaagagaagaatgaatatcatgaagtaaaagagctttcacattttgctgctaagtattgtgaaaagcaagcactttatgagcagtctgttttttacttgaacaaaagtttagaagcggatttacatatgaaaagaatggggttgatttaagatgaaaacaggtttaaaagtattattcgttgtaggtttagcgatcgctgcgtcagttctgactcaaaacgttgcgggttctttcgaagtagcagaaaaaatcattggtggttaatccaccatttatctctcgcccttgttgatcatcgtcagcaagggttttttgtatgttgttaataggctcttcttattaaacgctacaagaacgtttaataagaagaattcgcaacaaagggggtgtgcaaatttgttacctgccccattattctaaataaacatagggcagcgcaacaagttaaaaaggtcacctttctttgcttaatttaattttttgcaggacttttcattcacattttatcaaattggtctattgtacatagaagtaaaagaaaaagtcggaacaccgctccatttgtcatgcatatgatgtgatgagttgttagacgaaagcaggtgattgtatgtatccacgagtttatggaggttttcatggaggcggttttagcggtgggggagcacatatcggatcggttggttctcatatcggctttggcgggtattatgtgagccctggtgtgttttctggtttaggcggtttccctggatacggtggattcgggacattttctggatatccgtatggctccacgttcattatggggcgtcctcctggtttttatgtgagaagttatgagtgaacgttgaaatagccatctaacgattgactatttcaattggtgaaaatgcttcaatgcagcagtgatcacaatcaccccaaggatagagataggcagccaaatgatgataaacggatcgtacgcatctgtgtatgccgctaaagcggcacctaggcagtaaaagacaatagagcctattcgcatgaaactgacatgctgaataggagcttttcttttttcccggtgtgaaatgcgctgagccaaatcttcaaataggttagcgagtgtactcgttagaaccgttgtggaaatgccagccacatttaatttgcgggcggccgctgtctggagacccatggccatacttaaaaggataatcagcataaaataagcaccttgtgtataagggaatatggtcatgagagcaaatagaagtagtatcatgacttctatgataaaggtacgtgtaacggcttttggccaaaatgctttctcatgctttccgcctatcacaacagcaagtaaaacccctagaacgaatccactcagtgcagtgatggaatgaagggctgttagctgcaaggagcttcctgctgcaatgccaagcagcacaatattacctgtcatattggctgtaaacacatgccctaggctcaaatagccaatcacatccacaattcctgcggaaaggcacaagaagattagtgctatatttcgaaatgaatgtgcggtcaaaatggtcatccctttcttactctctaatgaataagtgtaacgcttaatgaccgcgtatgtccatcttatgtgccggtatgatgtcttcaagccgatgtaagacttgtctgaaagtgtcatcatttacaagatgcctcatgcggcggaatggatcgcctttttcctttagacgctctataacaactggcatggtaaacaaagaaggatgaagtccatcttgatggagttcgtcccattcaagcggtgtcgctacaagtccaagctcatttcctcttggtgaatagggcgcgatgattgtttttccagcatcgtgctgaatatagtctaaatacaagcgattgccgcgttttttcttaaggcgttctaaagtaaatagctcaggagcttgttcacataaaaattgacatataaacgcggtgaatgatctcgtttcttcgtatgtgaaggcatttttctttaatggaatatacacttgcagtcctttaccgccgcttgttttaataaaggctgtgagaaagagaccgtctaaaagcgctttgattcgcttggcagcctctatggctagatgaaactcgttaacagatggcgggtctaaatcaaagacgatttcggtcggccggtccgtatcccttgtttcaaaaggaatatgaaattccatcgccagctggttaccgagccaaagaagcgtctgcgggtcattacagaccgtgtaagcaatatcatcaacttgatcggtcaacacaaaatctggtgcataatcaggtgtcgacttttgataaaagaattcatccccagcgccatgagggaaccgaattaaagtaagtcgtctttcacgtaaaaagggcaagagatagggagccgcttgtctcaaataaagtaagtaatctgccttgttcagatgaagagccggcacaatcggtttttcaggatgagtgacctcaatcacggcagggagcggatacagctgtttgagcatttgctgaaacgtacatgctgctgggtcagtatctagtaaaaaggaagaaaaacgcggctctcttaaggcggatccatcaaaggatatacaagcaatactggcgacgatagaaggagggatttcatatcctgatgctccttttagctggcctttagtttgaaagagtgtacgtagcgtttgttcttcttctttagaaaacccatgcttgaattggacaacctcggtgagatgatgatcttgataaatacagccttggaaatagccattttctttatcaaaacgagtcacaatgacagagacatagcgccagtttttgactttcagccattcttttgaccgggtattgtcgtgccatttactcgtcttttttttcgcaacgagtccttctgctaaatacgtcgtcatcagctttttcatatattcatgatttgtgtctgtatgaataagttgaagaagggaagggtgctccaactgaacagttggcggaagttttgcttcttggaaaacttgctgtaactgttttttcctatccatcaacggtaaatcaacaagggatctccctgtgcatcttaatagatcaaatgcaatcaaatgacatggaaaccgctcagcctgcagctttatagcctctttgtttttcagcctgcctctttgctgaaccctcgcaaaatcgctttgctgttcatccagtaaaaagaccaattccccatcaaacgtaagtggtaaaaaaggagcaaactggtcccttaattgttcgcactgttcaataacctcaggaaactgttcgtttaatcgttttccggctctactttctaaatgaatctcgttttcctcccatatcaggatggtccgaaagccatcatattttaattcatacacccagtctgaaccggtaggaatatcatgtgccgccgttaatcgcataggtttcattgtcatgtcacttcctcatatgatgtgttcttagagtgggatgaaattttcattcgcatacataagtctaacgaaaacattacatagtaaggagaaaagaacggaggcgacgcgatgcatacagtttggaaaggcggcattagctttggactagtcaatattccagttaagctgtttactgctacagagaacaaagatattaaattaagacagctgcataaagagtgtcacacgcccattaactataaaaaggtttgtgccaactgcggggaagaggtggcaccagaacaaatcgtcaaagcgtacgagtatgcgaaaaataaattcattgaattagacgaggaagagcttgaaaaactgcgaaaagaaaatgaagaaaaagcggttgaaatcattgattttgtgaaaatagaagagattgatccaatctattatgaaagaagttacttcttatcaccagatactggcggtgcgaaggcttattcattattaagaaaagctttagaggaatcgggaaaaattggtgtggcgaagattatgatccgctcaaaggagcaattagcgatcgttaggtgctatgaacatattttgctgatggaaaccattcatttccctgacgaaattagacaagtatctgatgtaccgaatatcccccaagaggagaacattgtgaaaaaggagttagatacagcgctccttttaatcgagcagctgaccacgacattcgatccagcggcatatcaggatgaatacagagaacagctgatgaacttaattggcgataaaatatctggagaacatacggttcagccagaaacgacaggcaaaaaagatcctgcatccaatgtgactgatttaatggcagctctacaggcttcaatcgaccgatcaaaaccagccaaagcgaaaaaagcggctcctaaaaaaagaaaagcaccagcgaaaaaagaaaagaaagcataagaaaagaccgctttcgagcggtcttcactttcttcttttcagcgtgatagaaaacctttgaagtctaggaaggacgagcaccggagcgcagacctgacaacgaatgcgagggtttgcctacacgctgagaccgcttacgggcggtcttattgcggttttaacacgtcctgaatttccccgtcttttctgtgaataacaacagaagtccctttattagatgcaatctcctttgcccggtcaattgcttcttgtttcgtttctttgacctcacttgctcgtttcgctttctctgtctgaaccgcccagtcttcttcatgtttgacgacatgctgcgcatgatccatgagctctggtcttgcggagctgctgtttttagaaggcgtgactgaaccatgagctgagaaattctctatctcattcttcgttgcattctttttccactctttcgcttgactgatcgcaattgggatggctctattttcgtcatagccttcctgtatcattttgttggcaatctcaagcgctttttttcgaatgacgttatctaacgattgaaatgaagccggataatcattcatcgtccaaggcatatgaaacgctcctttcttttatttgaacaccttcccccatctgcaatggatcaaacatatcattcttctcaaaccaatgaaggggataaaatacatcgttttgctgaggcggaatctcatcaaatccagcagaatagaagggagaaaaggagtggttttgatgatgataaaaggtttgtatgaagcccatttacctgtgagtgatttgaaggcatctattgcgttttatgaaaaattggaattgacacttgctcacgaaaatgaacgagttgcttttttatggattgagaaaggaaagagctggcttggcttgtggaaagtagatatgaacgcctatccataccatccatcaactcggcacgttgcctttcaaattacaacgtccagtatcgaacagatcaaggcttggctggttgaaaaaggcatcagtattcacccaatgtttggcttttcagaagaggaacagcctttagttctggataatccgccgcaatttcatgcagcgatctattttcttgacccagatgagaatttgcttgaatgcattgccccgcttgaacttgatacagcagaagactacgatatcatgacatatgaggactgggatcgaaagaaaaatccgtttattgattgacaaaatcactcattgtaactatattgattacaacggtggtgaaagattgtgaaacaaattagcagcaggtatccaattgctgttcatattttgtcatttattgcaggtgttccaaaagagtgtacaggggattttattgcggaaagtgtgaattcaaatccagccattgttcgaaaaatgatggcaatgctcaaacgggcgggacttattgagatacgccgcggagtaggcggtgcttacttaaaaaggccgccagaggaaatcacgctattagatgtgtaccgtgctgtcgatgtaagcgaggatgaagaattatttaacttccatcagccagtcatcgcatgtccgattggtcaagcaatggatacaagactgaggagtgaactaaaagaagctcaggcagcgcttgaaaatcacctcaaacaagtgaccatccagcaattgttgacagagtcagaataaaagaagctcaggctgaacttgagctttttttacaccagttgttgtaatcgagatggttataacgaataaacggatacgtaaagctgtaccaaaacatcaccgtcgaatcacaaaatgaggaggtcaaacaaatgaagttattagtaacaggcgcaacaggacagcttggatcgctcgtcgtccagcatttgcttacaaaggtaccggctgaacaaattgcggtcagtgttcgggacccgcaaaaagcagcacatttgaaggaagctggggtggatgtacgccatggagactttactcagccagacacccttaaggcagcctttcaaggcattgaccgtcttttgatgatttcaactgcagaaggagaccgcgtgcagcagcatacggctgccatccaagcggcgaaagcagctggtgtatcctttattgcttatacaagcgttgtgagtgcaagagagagtcagcttgtccttgcacatgaccatgcaaaaacagaagaagcgattgtggcctctggcattcctcatgtgtttttaagaaacaattggtatgtagaaaacgaaaaagatacgattctagcagccgttagcggcgcaccatttttaagtccaattggtgatggcaaggttggctgggcaacaagaaatgactacgcagaagcggccgcaaatgcgttaacacttcctgtacatgaccaggagatatatgagctgtcaggacctcttcggacgcatactgaacttgcacacattgtcagtgaggtaagcggaaaagagatcaaagtcgagcaaattgatgtcgacacatttggagaatttttagcttcaaatggtgtaccaaaagaagctgtgccatttgtcaaagccattcaaagcggcattcgcgatggtgccttagctgttgaaagccgtgatttcgaaacattattaggccggcccttaacacctatcgaagaaagaattcgtgaattgatttcaaaataaatcttctcaagcgccctatcaaaagggcgtttttttcattcaagctacacatgccatatgtccaaatttagacaaatcacttcgttgaaatttcagaaatttgggattaaaatgaaaataaggcctgttatttcgtcatcagatgaccaaagtgatgattcaaattgcagcaaagaagggaagttcgccgatgaaagtccatttattcgttacctgtttaattgacaccatgcagccaaatgtaggaaaggcgacagtggaagtactagaaaggctcggtgtagaggtggaatttccagaggcacaagtgtgctgcggacagccagcctttaacagcggctatacaaaagaaaccatcaaagcagcaaaaaacatgatcaaagcctttgaatcagctgaatatgtcgtgacgccgtcaggttcttgtaaggcgatgtttttagaatatcctcatcttttaaaagaagacccagtgtggtcagcaaaagctgaggcacttgctgagaaaacatatgaattaaccgagtttattgttgatatattacacgtcacagatgtaggggcgagcctgaaaggaaacgcagcctatcacacatcctgtcatatgacgagactgctgcgaattaaggaagcacctttcacactgttgtcaaatgtcaaagatttgacgatgacaccattgccgcgcgcagaaaattgctgtggatttggaggaaccttttcagtaaaaatgacatctatttctgagcaaatggtcgatgagaaagtccaaagcatagaggagacaggcgctgaatacattattggtgctgactgcggctgtctgctgaatattggcgggaggctgaatcgtcttgataagcccattcaagtgatgcatatcgcagaagtattaaatagccgctgactttaagagggggaacggcacatgagtatgaaaattggagagaagggctttaaagaacgaatcggggaagggttagaagatactgtcatgagaggtgctgtatcctcagcgcaggaacgcctgtatgaaaggcggctatctgcgagcgaagagcttggcaactgggaaaagtggcgagaacttggcgaggaaatccggcagcatacgctgacgcatcttgatgactacttataccaattaagtgaaagcgttagtgcacgtggaggacatgtcttttttgcaaaaacaaaggaagaggcatcggcgtatatacaaaatgtggcacagaaaaaagcggccaaaaagatcgttaaatcaaaatcaatggtcacagaagaaattgaaatgaatcaagcgcttgaagagatcggctgtgaggtggtggaaagcgatcttggcgagtatattctgcaagtagatgatcatgaacctccttcacatattgtggcacctgctcttcatatgacgaaagaacaaatacgagaagtctttcacgaaaagctcggatatgagatgtcagagacacctgaagatatgacgagttttgtgagagccatattacgtgaaaagttcctcgaagctgacattggtgtcactggctgtaattttgctgtcgccaatacaggttccatttgccttgtgacaaatgaagggaatgcggatcttgtcacagctattccgaagacacatatcgccgttatgggcatggaacggattgttccaacgatggaggaactggatgtccttgttggtcttttgtgcagaagtgcagttggtcagaaattaacaagttatatttctgtcgtcgggccaaaaggaggagaagaagtggatggaccagaagaatttcacttggtcattgtagacaatgggcggtccaatatattaggtactgcctttcagcctgttctccaatgtatccggtgcgcagcctgtattaatgtgtgcccagtttaccggcatgtgggcggacattcatacggatcgatttatccggggccaattggcgctgttctttcgccgcttcttggcggctatgatgactaccaagagctcccctttgcatcaagcctttgcgcagcctgcacagatgcttgtccagtaaagatcccgcttcacgagttattaataaaacatcgacaagtcatcgttgaaaaagaggggagagcgtctaaagctgaaatgatggcgatgaaaatgttcggaatgggcgcatcgactcccggaatgtatcaattcggaacaaaagcagcccctgtattgatgaatcgtatggcttcaaacggacagatttcaaaaggaataggtcctttaaagaattggacagatattcgtgacctgccagctccaagtaaagaaagattcagggattggtttaaaaagagacagaaggaggagcagtgatgaagggaaccatttctcaccgagagtcgtttttagctcatatccgtaagcaattaggtaaagattcctccccgtctgcatctattcagcgtccagcttggaagcatcaagtccagtgggaaacaaacggacttttgtctaaagaagaaatagtcgagcaactgaagaagcaatgtcaacgaattcacacaagagtggtcgaaacaacaccacaggaagcgccctctgtattaagattattgatgacagagtatggagagggttctgtgatgacgcctgtcgatcatcgttttgaacaatatggatttcatccgatgtttgacagcttgcagcacgaaggattcgcagtcaccagctggaatgctgaggcatcaagggaagaaaatatcaggctggcagaacaagcgacatattcggttgtattcagtgattacacccttgcagaatcaggtacagtcgtcctttcatcccatcaaggccaaggcagagcgctgcattttttaccgatgatgtatatcgtgtgtatcgaaaaaagcacagtggttccgcggatgattcaggcagtttcggctcttaatcgctccgtagaagagggggagcaggcgaaaggtgctattcatttcatatcaggtccgagtaactctgcggatattgagatgaatttagtggtaggtgttcatggtccagttcgggccgtttatctgttaatagatgatgaatgagggctttcgtgatgaaagcctttttttcatgcaaaaaagctcacacaagttttaaaatcatcttgcctctagcggattggacatagtaagatgacgacatacaagatgaacttctcatctactgctgatgtaaaggaagctgcttatggaaatgaagtcaactgctcaaaagaaatcaattgcactaccgcttgtgatttcaattattgccatttcgttttctgctatcattgtgaaatggtcaaatgcacctgctgctattttaagcatgtatcgaatgatctttgccgcggcttttatgctgccgtttatcctgccacgtaaaaaagaatttctttcaataaagcgaagagactggtttttcttatgtatgtcaggcttctttttaggactccattttgtgttgtggtttggctcactgaagctgacgactgtggcaagctctactattattatcgcccttcagccgatggtctccttattaggcggctttctcattttccgtgaacgaaccacgctgcccgcactcttgacaatgtgtgcagcgattgctggtgcactcatgattggatggggagacataggtcatagccaggaagccatcctaggagacattttatcctttttaagtgtgatcgcggttgtttgttatttattaataggtcaacaggctgtaaggaaaatatctcattggatttatagtttttgtgtgtttggttttgctggtctttttttaattctattcaacctaatgcagcaaactccttttacaggctatccgggtaaagagtgggggatttttttattgcttgccatcattcccaccatgtctcatgtcattaataattggcttttaacttatgtcaatgccacaacgatttcaatgagtatacttggcgaacctgttggggccacgattcttgctgtatggctacttggagagaaagtcacgctgtttcaaatgcttggaggtcttcttgtccttttaggcgtctttttctttttgatgcagcagcgtcaaggaattgtgatgaaaccaaaaaaatccggttaaatcccggattttttactcttttaaatcatttttttcaatcactttgttcaatctttcctcaaccttcttcaattccattcgtcttcttctgatcattcgaaaagaggtgacaatcatagtcacgataacagcaatgaatagaagagagaacacttgaaataaaaaatctccaagattgaatgccatattctctccattagacatacgtaaaacctccctttctatctatatattaccataatcaataaaagattgagatttatccataatttatctataataggtaaaatatcactcattaaaggagaaccaatatgagaactttagtccttttacgaggtctcccaggcgtaggtaaatcaacatggatcaaagagcaaggcttagagccatatactttatcagctgatcagatccgtcttttgacccagccgccgcagttatctgtcaatgggaaaccggaaattacgagcaagcatgatcataaagtgtggtctttattatttgatttactcacagcccgaatggaacgtggagattttactgtgattgatgcgacacatgtcacaagcaagtcgatttctcaatataagtcgttagctactacgtatcgttacagggtgtatgtcgtcgatttcacgcaggtgccgcttgaaacagcccttctgcaaaatcgctcacgggaacctcacaaagttgtgcgggagtctgttttatatcaaatgaacgagcggttaaaaacagaaaaggtcccatcatgggtgactgttttacagcctgaggaatatccgcaagtgatgacctatcagcctcgatccttcgatcaatatgaggccattcatgtctttggagatattcacggctgtcataccgctctgaccacctatttacaaggagatattaaagaaaacgaactttatatctttgtaggtgatttgcttgatagaggaatagaaaacaaggaagtattagaatggatgctcgcacatagagaatgccggaatgtcatcgtgattgagggcaatcatgatcagcatttataccggtttgcacatggtgaaaaagtaagaagcaatatgtttaaccggcatactgcacctgaaatcgaagcagcagactttgatttaaaagaagtacggaagtttgtcagaacatttcatcagcttacttattttacgtaccatggcaagacatttcttgttacccacgggggacttgctcatatgccagaagagcttctgcatgtctcaacacagcagctcattcatggtgtaggtgaatattcagatgacattgaccacttgtttgttcaaaacaccgctggattagatgtcattcaaattcacgggcatcgcaatttatacaggctgcctattcaagcatcggaaaggtcttataatctagaaggccaggttgaattcggggggcagctgagggtcttgaaaatcacagcagacgggattgagactcatgaaattgacaacccagtctatagagcttctgagaaaaaaccatcgggtgctcttcaaccagatatctcactggatgactttttagctcacttagatcagcatgaatatgtacaggaattaaagcttcctcaccatatttcatcttttaattttacgaaaaaagcttttagtgaacggcagtgggatgatgtgaatgtgaaggcaagaggtttgtttgtcaatatggtgtcaaagcagattgtttcaagaagctacaacaaattttttaatattgacgagcgtccggagacaaaaatgcatcatctagtgaaccatcttcaattccctgttaccgtctatgataaagcaaatggatatttaggaacggttgggtataacgaaatggaaaatgaattggtgtttacgtccaaatcgtatacatcacatgtgaagcaaaatccgcatgcttcctgggtcgaagagctattttatgcaacctttgacgatgtgcaggtcgactacatcaaatcatacgtacgtgacaacaatgtatctcttgtgtttgaagtcattttaccagagaaagacccacatattatcacatatgatcaagatcaactcattttgcttgatattgtgaagcgtcagctaagctatgaaaaagcaccattcactgaagtgaaaaggttaagcgaacagcttggaatgtcctgcaagcaggaagtggctgtgttccatgattggacgtctttttataaatggtatcaggcagtctctcatgacgactcgattaaagaagagggatttgtcatagaggatcatcgcggattcatgaccaagctcaagctcccttattatcaattctggaagcagatgcgtgctattaagcagcgtgtcgccgagaaacgttccacacaaaaatatatgcaggctttgcaaacagcggagcaagctagattttatacgtggcttcttgagcaagatgccaatgatgtcaggaatagctcaattattgagctgcgaacacaatttgagcaaagcgatgctgcccaattgaataatgatgaaataaatgcatagtctaaacatgagtcttttctaaggaaaaggctttttttgatgcaattgaaaggtagccccatatatgcctgatcatattgaagtgattcttcgaacgatgtttgcttttgcgattttatttggtggagcacgtcttcttggaaagcaaacatattgatacatatgacggccatattcagtctccgattgatcaagaatgaacgtgtagtgcagaggtcacccacatgacacatatctgccaagatttctaagtcctttggatgctgtctgactaggcatcatttctcaattattattattttcagaaaatgtgatgacggagaaaaataagtgtgtttaagtatatatagaagaaattaaaatattaatataatataccgcatgcggaatgaacattcattcctgaaatgaggaggggatgaagtgccagcagtgactgataaacaagaacagattatgaaggcttcactagatttatttattgaacggggctttgatgggaccacgatgccgatgatatcaaaaagagcaaacgtcggagcaggaaccatttaccgttatttcgacagtaaagaggccctcgttaatattttgtaccagcgcagcctttctgcatttatcgaaaaaatgaacacaaacagtccagatccaaaggcaagtattcgggcgtactttaagcatgtattttattgcttggttttatttacaaaggagaatccaagcgggctatatttcttagaaattgataaacgatcccattacttagacgagacgagcaaagagaaaatgcagcttttgttacatgagctattccttatctttgaagaagggaaaaaggatgggattcatccaaatctctcaggtagaaccattttatcgattgtatttggtgcctttgtacagctgcataaacaaattcttgcagaagaaatagagccaacgattgaatttctagaggacattgagcaatgtttatggcgcgccattagcgttgcttcttaatgatataaagggagtgggcacatgcaacaaacatcaatcattccaaaaccaaaaacttacggaccttttaaaaatattccccatatcaaaaagggggagctttctcaaaccttttggcgtcttgcagatgaattaggaccgatctttcagtttgaattttcaaaagcaacaagtatttttgtttccagccatgaacttgtccaagaaatatgtgatgagagccgttttgataaatacattgggagcagtctcaataaagtaagagcatttgcaggagatgggttatttacgagctggacagaagaatcgaactggagtaaggctcaccacatcttgatgcctgcgtttagccagcaggccatgaagggctatcatgagatgatgctcgatattgccacacagcttgtacaaaaatggcaaagaacaggccgtgatgaagaaattgaagtagcagaggacatgacaaagcttactttagatacgatcggactttgcggttttgattttcgatttaacagcttttataaagaaaatcagcatccattcatcgaaagtatgctgaatggtttaaacgaagcgatggatcaggcgagccggttgcaggttgcagataagctaatgatcaaaagaagaaaaaaatttgaccaaaatgtcgattttatgaagcaattagtagatgacattattcaagaacgaaaaaaacaagataaaacgggcgatgatttactgtccctcatgctgcatgcaaaggaccctgaaacaggagagcgcctgtcagatgaaaatatccgctatcaaatcattaccttcttaatagctgggcacgaaacaacaagcgggctgctatcctttgcgatttatttcttattaaagaatccagaaaaattaaagaaagccgtccaagaagcagatgatgtgctgcaaggcggactgccaacatttaagcaggtacaaaaactaaattacactcgtatggttttaaatgaatcacttcgcctctggccaacagcgcctacgttctctctttatgcgaaagaggacaccgtcatcggagggaaatattcgattgaaaagaatcaaagtgtctccgtgcttctccctaagttacatcgtgatcaagcggtatggggagaggatgcggaagaatttaaaccagagcggtttctgcaccctgaaaagatcccgcagcatgcctacaagccttttgggaatgggcagcgtgcatgtatcggcatgcaattcgcccttcatgaagccacaatggtgctagcgatggttctgcacaatctggaattgattgatcacacatcatatgaacttgatttaaaagaatctctgacgattaagccaaacgattttaaaatcaaagtgcggccacggaagcagaaactctttatggcaccaccgaaagaagaggcgaaaaaaagcacaaaatctgatgagtcaaaagtggccagtcacggtacaccactgcttgttctatatggatcaaatcttggcacagcgcagcaaatcgcaaacgaatttgctgaagacgggaaagcaaaagggtttgacgtgaccactgctccgcttgatgactatacacgccaattaccagataaaggtgcagtcttaatcgtgaccgcttcatacaatggacatccgcctgaccatgcgaaaaaatttgtggattgggtcacgcaggatgaagagcaggatttatcaaacgtgacatttgctgtttttggatgcggagatcgaaattgggcgagtacgtaccagcgtattccgcgtctcattgatgaagcacttgaaagaaaaagtgcaaagcgtgtagctgatttaggagaaggcgatgcaggcggagatatggatgaggataaagaaacattccagaaaacggtctttaagcagcttgcaaaagaatttaagctcaccttccaagagaaaggtaaggaaaatccaaaattatcagttgtttatacaaatgagctagtagaacgtcctgtggcgaaaacgtatggtgctttttcagctgttgtactgaaaaatgaggaattacaatctgaaaaaagtgagcggcaaacaagacatattgaactgcaattgcctgaagagaaacaatacaaagaaggggatcatatcggaattgttccgaaaaatagtgatgcactcgtgcagcgggtgatcaatcgcttcaatcttgatcctaagcagcacatcaagctttcttctcagaaagaagcaagtcatttacctttagatcagccgattcaaatgagagaattacttgcgtcacatgttgagcttcaagagcctgcaacacgtacgcagctaagagagctcgcagcatatacagtttgtccgcctcaccgcgtggagcttgagcaaatggctggtgaagcatatcaagaagccgttttaaagaaacgagtaaccatgctggacttattagatcaatatgaagcgtgtgagctgccgtttgtgcactttttagcacttttaccaggtttgaagccgcgctattactcaatttctagctcaccaaaggtcgaagaaaaaagagtcagtatcacagtggcggttgtgaaaggtaaagcgtggagcggccgcggagaatatgccggagtcgcatcaaactatttatgcggtctgcaggcaggagaagaagtcgcctgcttcctccacgaagcgcaggcaggattccagctgccaccttcatctgaagtaccgatgatcatgatcggaccgggtacaggaatcgctccatttagagggtttgttcaggcaagagaagtgtggcagaaggaaggaaaaccactaggcgaagctcacctgtattttggctgccgtcaccctcttgaagatgatctgtattttgaggaaatgcagcttgcagcgcaaaaaggagttgttcacatccaccgggcttattctcgtcacaaagagcaaaaagtatatgtccagcatttgttgaaagaagacggcgacatgctgatcaagttacttgaccaaggtgggtatctttacgtgtgcggggacggaaaagttatggcaccagacgtagaggctacgcttatcgacctctatcaaaacgagaaacattgctcgaaggaaacagctgaaaattggctgacaacccttgcaaatgacaatagatatgtaaaagatgtgtggagctgaaaaattaggaagaccgccaattaggcggttttttctatttcagagagatcaatagaatgaaggttggaaagatacaaaacacctaatttaaaaatgaaatattttgtaaaaaataagaatattctctcatttactccaatatgaaacaatcgtatgatttttgatataggacataaaggaggaatatgatgaaaaaggtgaaaatgttactgccttctctactcgtttttggtgctttaagtgtgcctagttttgcccatgccacatcggattcagtactaacgtctgattatgacatggtgacttctgatggaaaggtgatctcttcaagtgatttccacaatgatacgaaatccccctcatcctttgacaaagtggatgatctttcttctactgttggcgaaaaagtaaaaccactatcaaaatatttaaaagactttcaaacaaaagtcgtcattggagacgatggtagaacaaaagtaacaaacacaagagtggcaccatataattcaattgcttatattacatttggcggctcaagctgcacggggacactcattgcccctaacaaaattttgacaaacgggcactgcgtgtacaatacagcatcgagaagttatagtgcaaaaggatcggtgtatccaggcatgaacgatagtactgcggtgaatggctcagcaaacatgacggagttctatgtaccaagcggatatatcaatacaggcgcaagccaatatgattttgccgtgatcaaaacagatacgaacattggcaatacggtcggttaccgctctatccgtcaggtgacaaacttaactgggacaacgattaaaatttctggatacccaggtgataaaatgagatcgactggcaaggtgtcgcagtgggagatgtcaggttctgtgacaagagaagatacaaatctcgcatactatacgattgatacatttagcggaaattcaggctcagcgatgctagatcaaaatcagcaaatcgttggggttcacaacgcagggtattcaaacggaacgattaatggcggtccaaaagcgacagctgcctttgttgaatttatcaactatgcaaaagcgcaataaaagctagagcacaaagcttgtttccttcataggggacaagcttttttatatggatagaatcactggtttctatctgtctacgcttgagagattcattgagttctcagcctcatcatttttttcacatgtcattcgtgaaccgctcatacattaaaatgacacatttcctttaagtcaagattctgcttgagaaaaatgaggaggtctcacacttttgaaaatgagaagaggctggatcactggtgtcgccctatgctttgtgatatggatgggcacgttgttaggtggatttggggagaaacatgcggcaaaaggtgcggatcgatatgatcatgtcattcaatttccaaaggaacggtaccctgaaacaggcagccatattcaagaagccattcgaaaagggcattcagatgtgtgtacgatagaccgaaatggagcagatgcccgcaggcaagaatcattaaaaggaattccgactaaacctggctttgaccgggatgagtggccgatggcggtttgtcttgagggaggaaaaggtgcgagtgttcaatatgtcagcccatctgataataggggagcaggctcatgggttggacaccagattagcagttatcctgatgggaaaagaattttatttattgtgaaataaaactggaagagaggcacctgtgagtaggtgccttttttgttgatgatcagagcgtattggagctagcagggacaaaagattcagtggtacaatggatctataaggtacaaagactgacaagaagaaaatgtgaagggacatatgcttatggataagaaccgtgcattatacgattttttcatgcaacatgcagagaaactgactgaaacttggtatgaatcaattgaggataatgatccagaatcaatatatcgttcaacagattccagcatcatagcagagctgaaacggcaaaatcaagattattaccagcattttatacgtgctcttattgaagacaaaacgtatttacatactgagtttataaagtggtctgaagacttagccagtgacccgaagcatttaaacacaccattagattatgttgtgagagaatacatgtccaatcaaagagtggtccttcattacttaaaagaatttattaagcagcgtcaagatgaaattgatattgaccgcatcttttattggtatgatttaatttcagaggcgtttaatatttcaattcatgtgttcatccagcaatatgtgaaaaatacaacgaagaaactcgtggcacaaagagacatgatttacgagctgagctcacctgtcattgtcttaaaaaatcatattgcgttattgccgttagtaggtgacattgatacagcgagagcaaagatgattttagaaaatacgctgaaacagtgctcgcaaaaaggcgtacagcatttatgtattgatttatcgggcgttgtcattattgatacaatggtggctcatcaaatctttgatcttgtcacatcacttcggttaattggagtagagacgaccatttcaggaatcagaccagaaattgcccaaacagccgtgcagcttgggcttccttttaatgaatttcgcacggcatcatcacttgctcacgcgctggatcgcatgactgaattttctccaatataaaaaccaggccgattgaatggcttggtttcttatttagatgacagcgtcaatttttgtgactttccaatctttttgtactttttcgtacgtaacagttcgttttactttgcgtccatcaagtgttgggacggtgaattcatatgtgcggaccgtttgttttttagagacaagtttaggtgtggctttatcccaattaagcatgttgtctccgtcaccgactggaacagccattttgcctttatgaacaatgaactggtagtcttttaaaccttgattgatggcatcttttgtgaaaacttgagataggtagctgtttagttttttctttgtatcaaatgttttagaaagatagttgtatgtcatgtctttatagctaaatgattttaatttgtaatcggaatgttcattaattttgtagcctgacatcgcactccaaaagtgttctcgtgcgtcaagggcaatatgtaacgcttctttatttgtcaaagcggctggttttttagaagcggccaatgttgtagattgtaatgagatcataagcataatagcagttaataaaacgaataattttttcaaggcgattgcctccttttctcaatgaaaacttcttatgttacaaatgttacaacaattacattgatattacaagtattaaatctaaatgttttttatttcttttctttctatatatataacgtttgagggagacaaaaagttttcatttttttattttttctttacatctactatttaaccgttctaaagaagaacaaaacgttttttggaaaaatttttgtttggacgttcaacacgctttttcatttatgacatatactatcgtgatgaatgtctaagaaagtggtgttgaatatgtattatccgtatgaaggtatgtggaatgggtactcatatgacaggcagatgcaaggatggccatcactccctattcctcaagttggaggatttccagggtttccaatcggaggaggaggcactggacccggatcaagcggatcagctccgccagctccgccgcagcatatcatttcgcagtatcagcaagcattatcacagcctcaaagcatgcagtcacttatttcagggcaaacaggtggaggccagcaatctgttcaatttgcagcgggatgtaatagaagatggacgattgtgttcatgagaaacggtcaagtgtttttaatgtatgtcctatcctcacagcctttcgggagaacaactggctttatttggccaaactttacatttggttccttcccaagctcgcgtattctagcatattcttgttcataaaagaaaaagccggttctcatcagcagctgatgaaataccggctttttttagtgaatatttctaaatacgccaatcactttacctagtatacttacattctgtaaaataatcggttccatagatgggttctctggctgtaatctaaagtgtgtatcttctttatagaaacgtttcactgtcgcttcatcttcctctgtcatggcgacgacaatatctccattgttagcggtgctttgctgacgcacaatgacatagtccttgtccaaaattcctgcatcaatcatactttctcccataatttcaagcataaatacttgttcatctggtgctgcaaaagtctctggaagagggaagtattcttctacattctcaacagccgtaataggcaggcctgctgttacttttccgatgactggtacgttcattacagcactcttaggaatattcatttcctcttcatctagtacttcgatcgctctaggttttgttgggtctcttctaattaagccctttgtttctagtctagctaaatgtccatgaaccgttgaactggatgctagaccgacagcttctccaatttcacgaacggatgggggatagcccttactttttacttcttctttgatgaatgtcaggatatcgagttgtctttttgatagcttcgtcatcttttgcacctcaaaacgtcaattttaaagaaattatagcatgtttttcctaacagtacaaacataggttcgaaaaaaacgtttgacagaaacgtttgttcgtatttataatgagtgacagaaagagcgaacacatattctgttaggagagatgacattatgaggttaaaagaatctattatttttattggggtattctcattcatcgttggcatatttctctcacttattgcagtcacaagccataatgatccaaatcagtatgttaaaatagaggttcaatcaggtgatactctttgggggttagctgatcaagtaaacgacagcaaatcaatcgacaaaaatgcgtttattgactgggtcactcagcacaatgatcttgcttcaacggaaatccagcctggtgacattcttgtcataccagtcaaaaaagagcatccagtcgtatatcaacttgcaacagtacaatagaaaggtcgattgaagtcatgaatgcaatcatctatgcgagagtaagcactgtcaaagaagagcaggaaacctcgctgaagagacaagaagaagaactgctggctttagctgctatgcacaagatgaatgtggtgaaagtcatcaaagaaaaagcaagcggatatgatctagatcgtgatggtgtgtttgatatgctagctacactaaaagaagagtcaattgatgccgttcttatccaggatgaaacgcgtctcggaagaggacaagcaaaaattgcgcttcttcattgtctttttaaagagaacgtaaaggtgtacagtacgtttcatagaggcgagcttgagctttcagaagcagatgaaatggttattgagatcgtaggagtagttgaagagtatcaacgaaaaattcataacctgaaaatcaagcggggaatgagaagagctgttgagcgcgggtatcagcccgaactgaatttaaaacagcaggatcatgcgcctggccgtgagcgtattgaagtgccgatttcagaaattgttcgattaagaaaaaacaacatgacattcgcagaaattgcagcaactcttcaggcactaggttttgacatttcaaaagcaacggtccatagaaggtatcaagaatatgaaaaaggtctgaccacctaaagcttgatttgttgtcaaaatgattgatatttagtagtatgtagagaaaatgttttaaaggagtttgtcatgatttctaaaaagcagcttgcaagaatcaatgagctttcaaaaaagtcgaaagagaccggtttatcagacgctgaaaaaacagaacaaaagctattgagagaagagtatttaaaagcttttcgttcttctatgaaaaatacacttaaaaccgtgaaaatcgttgatcctgaaggaaacgatgtcacaccagaaaaattaaaaagagaaagagatcaaaaccttcactaagtctgtgatttcttaaattttgaaaagatgggaagtatattctcatcttttttcatatttgcataactttttaggtgatcgataaactaaatgtgacaaaatcactctttttcagcgtgaaatagttgtgaaaaaaggacagtagatttatgataatggtgtacacaagatacggaaggggatttatatggaaacgattgaattgaaatctattgcaacaatacgtactctctccatagacgcaattgaaaaagcgaattccggtcaccctggaatgccaatgggtgctgcaccaatggcatacgctttatggacgaatcacttaaacgtaagtccgcaaaaccctaattggtttaacagagaccgttttgttttatctgcggggcatggttctatgcttctatatagcatgcttcatttaagcggatacaacctgagcatcgatgatctaaaacaattccgccaatggggtagcaaaacacctggacatcctgaatttggacacacagagggcgtagatgccacaacaggtcctttagggcaggggattgccatggcagttggtatggcacttgcagaaagacatcttgcggaaacgtataacaaagacaactttgatgttgtagatcactatacatacagcatttgcggagatggggacttaatggagggaatttcctctgaagctgcttcacttgctggtcatttaggcttaggccgtttaattgttctttatgattcaaatgatatttccttagatggcgacctagatcgttcattctctgaaaatgtgaagaatcgttttgaagcgatgaactgggaagttctctatgtgaaagacggcaacaacattgaagaagtgacggctgctatcgaaaaggcgaaacaaagtacagacagacctacattgattgaagtgaaaacaacgattggtttcggatcgcctaaccgtgcaggaacgtctggtgtgcatggtgcaccgcttggcagcgatgaagccaagctgacgaaggaagcttactcttggacgtttgaagaagatttccatgtaccttctgaagtgtacgatcatttcaaagaagctgtaaaagacgctggtcagaaaaaagaagcagcttggaatgaactatttgaacaatatgaaaaagaataccctgagcttgcagctcaactgaagcttgcgattgaaggaaagcttcctgagaattgggatcaagaggttcctgtttatgaagcaggttcaagtcttgcctcccgcgcttcttcaggcgaagtattaaatggcattgcgaagcaagtacctttctttattggtgggtctgctgaccttgcaggttcaaacaaaacaacgattaaaaacacagacgattttggtaaagataattatgccggcaagaatatttggttcggtgtcagagaatttgcaatgggtgccgcgttaaacggtatggcacttcacggcggccttcgtgtattcggcggaacgttctttgttttctcagattacttaagaccagctattcgtcttgctgccttaatgggacttccagtcacatatgtttttactcatgacagtatcgctgttggtgaagatggtccgacacatgagccggttgaacagcttgcttcattacgtgcgatgcctaatctttctgttattcgcccagcggatggaaacgaaacagctgcagcgtggaaacttgcggtatcttcaacggataaaccgacagcactagttctgactcgtcaaaaccttccaacgattgaccaagcaccagagaaggcgtatgagggagtagaaaaaggtggatacgtcgtcgttgaagctgctgatgcacagcccgaagcacttctactcgcttctggatctgaagtcggtttagcgattgaagcgcaaaaagcacttgaaaaagaagggatccgcgcgtctgttgtcagtcttcctgcatgggatcgtttcgatcagcagtcagatgaatacaaagaatcagtccttcctacagcagtgcgggctcgtattgcgattgaaatgggagcttcacttggctgggagcgttacactggtcttgatggtgacgtgattgccattgataaatttggtgcttctgcaccaggtgaaaccattattgagaaatacggatttactgtcagcaatgtggtcagccgtgtgaaagcaaagctgaacaaataatcaatctccaagcatcatgctttttttccatctgtttgcagagcattttcatccgctctgcaaacttttttcttttttcttgtttttttgacaaaactagtttcttcttgcttcatatatagacaattctttctttcacatttttgtataatacaagcaataaacgagattgacgaaatgtgaaaggaagggatagacatggaacgccattattatatttattggattgaggatgaatttgcacatcattattttggcagagaatcaattttgtttcatttgtttgagtcgttacactggacgaaccgcacggaagatgaattggtgatgcttgtgaaacaagtggattacgtgacgaaacgaatccctgcttttcatatgcaccagcgcttaatgaacaacttaacgaacattcactatacacaaattggctcgatatacagcgcttccttacctgatggaaaaggaacggctgcatttattataaaagaccgttatatccaaatgtctgccaccggcagttacgaggcagaagcggtgttttttgaagtgctgagaaaaattagtccttgctttcttgcgatggacttcggttcaaagaagcacgggtggctcaatccggtaaaagtgaggaattttgtttaaaaaaataaaattgaacgtgaaatgttgtataatagccttttgtttagtacactttatacgagacaacatgaaggaggaagaattatggatttatgggttgtcatccttgtaggcgttgttgcactgcttgcaggagttgcactcggattctttattgctcgtaagtatatgatgagctacttgaaaaagaatccaccaattaatgaacaaatgcttcgaatgatgatgatgcaaatgggcatgaaaccgtcccagaagaaaatcaatcaaatgatgaaagccatgaacaaccaagcgaaataatacgtacgatattatgatcatagatggaacatggttataaagaatggacaagcgttgtcctttctttattgaattcaccttcatcagacgctttaaaaccactgtacttgcatgaataaagcagggaaggtggtttttattttggcgtcagcctccttaaaaaacaaaaacccctgtcatcagaggtttttgtttcgtttatggtcacacatatcaactgttctaaaaatcgtgcagcatgatagatatcatgagatatgattagttggctgagtttgagtgtaagtgtcgttgatattgtaagagaagatgatctagctgctggctatgttcgatggtcactgttgatgtcatcccattatgcaagacaactttcatcagctcttctcttttttcttcgatttgagttaataatgatgtttttaccaaagtcatgttcctttcatgcaaatcttgataaaaagaatcgattttattatatccattttaaggtttattttcaaatttaaaggattcgttatcttgatgtcaaattaaattatataaggttttaagagaatagaccatctttattgagaggatgtaaaaaaaatgaaatgattttgtcatctcttattgtatattgtaagaagggggtgttcttttgacagatttgaattactttttagcttttggagcagggtttctttcttttatctcaccatgctgtctgccgctttatccagcctttttatcgtatattacgggcgttagtatagatgaagtgaaatctgagaaggtgatgctgagaagaagaagtctgcttcataccttattctttttagttgggttctctattatatttattgcgattggctttgggacatcgtttgttgggaagtttttttatgattaccatcaagcaattcgccaggttggagccattctcattattttctttggttttatgattcttggtgtcttccagccttctttccttatgggggaaaagagaatgcagttcaaaaatcgtcctgctggtttttttgggtcaattctcatcggaatgggctttgccgctggatggacaccttgtacaggacctattttatctgctgttatcacacttgctggcaacaatccggagtcggctgtcacatatatgattgcgtatgtattcggatttgccgttccgttttttgttctatcctttttcatcacgaaaatgacgtggatcagaaagcgccagcagcttatcatgagaattggcgggatcattatgattgtggtagggatattgctgttctttgatcttctgacatggattatcatcatgttctcctcattgttcggcggatttacaggcttttgaaatcgttttctacagtcgcggcgaatggttttttttcgtcaattggagtatattatacataggctgaccttaaagaataaaggaatgatttgatatgatggtcttgatctcttctataattgcgatatgtatggcggtagccgtcatgtttattcgcattaagtcatctgcaaaacctgcaaccgcaaaaaaaattatattacctcctattttcatgagcactggggcactaatgttttttgttcctatgtttcgagtaactggggctgaatttctagaggcgatcacagtggggatgtttttctccatatttttaatcaaaacatcgaagtttgaaattagagggaatgacatttatttaaagcgatcaaaagcatttgtgtttattctcattggacttcttgttcttcgtatcgggatgaagaccatcctgagttcttctattgattatggttctctaagcgggatgttttggattcttgcctttggcatgatcgtaccttggcgcgttgctatgtatttgtcgtttagaaagctgtctaagcaattagatccgcagcaggttcaaatgaattaaacctccttttgataaaggaggttattttaataacgattcatatggcgtgtgatcgatgtctttttcttgaaggcgcttcagtaaaaacttatgatcccgctttggggtagcgataatatagccgcgaatgattaaatctaaattaatgctggcagcttgttcttttaaagccagctcgccaatctttcccgcaattttttctttggcgacatctctaaacagctctggaacaggtaatacgagttcatttaaaagctttttgtcttcttcccgccataggtggaggctcttttgaatatattcatcctgccaatcaagctctgatttcccatcttccttcggcaatcgttttaaaaatttgcgaaacataaaaaagccaccgattgcgagtaatccgatcatcaccgtaccccaaaataaaatgaaccacaaaaaccagccgcttaacatgttctcactccttatacccctcgtctctctatcttattttacatgaagagatgatagaagaaaataacaaaaatgtatgtctctcatctctatgaacgccttttttcattcataactgcccatttactagaaagacccaaaccatctagtagaaaaagaatacattatcatatagcgactctactatttggccatggtggttcgcaaaaggtattgacttgacacgaacggaagagagcccaccaaatgaaggtgggctcttaatgtttgaagtgcgggatttgaaaggaaaatgccccgcttggatagtcggaactttttttaattcttatcgaaatgattcggttttcgtattctgtttcaatatctttgtcgttcagataaaaagggagcatgacacttttttcaattggctgttcgccttcatcatttggcttttgtaccgtgtaacagagagtcagctcatgtccagcgaaggtcagctttacatcagtgatcgacagggtggagacatcaatctcaataatataatcgcggcttgtttcataaagatcaattgggaggtgttcatcataccaggcaaatggatcatccattaagacattgagccaatcatctatttctagaaaatcagaggaattcgattgtttttcattctccataaacactcctccatcacatctcataataaatgatatgttgagaactgaaatgtgtgaaagacctaaaacatcccgctttgccacgggatgagaggaggatgtttacatatcatgatgagaattgtgcttttgtcttgaatggttgcggttttttacttttttactgcctgataatggttccggctgtccgctttgatgttccttaggcgagttttgacggatgtcttttcctgtgtttttattcgtcataatgtttgctcctttcttattggttttttttacgttttttattattttgtctttgttcttctgttaaaacgagttgatcattttcaatatagcctgcaccatttccttggcttttggctgcgttcatgccgtcaatcacatgatttgctttacgttttgtcatgttctatcacctcaattgtagtatgaacccgctctgcttggattatgaagagtaatcatttcctaatgataagataaacttattgaatttaataaaagcattgttatttacttatgtatgaatttgttttaagatgaaattgtgagaaaattgtggtgaaatacgacgatttttctgagaattgaaattgatcttgatcatcaaaagggggattttggacatgtcgaaacagcagcaagtcgctaaacaagacgcttttcaatctagaaaaacgttttcgacaaatgggaaaacgtatcactattattcgttagaagcactagagaaacaaggaatcggaaatgtttctaagctgccttattccattaaggtacttttagaatcagtgcttcgccaagtagacggtagagtgatcaagaaggaacacgttgaaaacttggcaaaatggggaactgccgaggtcaaagaaattgatgttccatttaaaccttctcgtgttattttacaagacttcacgggtgtaccagccgtcgttgaccttgcttctttaagaaaagcaatggcagatgtaggcggggacccggataaaatcaaccctgaaattccagttgaccttgtcattgaccactcagtacaagttgataaagctggaactgaagatgctttaaacattaacatggatttagaattcgaacgtaacgcagagcgttataacttccttagctgggcaaagaaagcgtttaataactatcaagctgttccgcctgcaacagggattgttcaccaagtaaacttagagtaccttgcaagtgttgttcatgcgattgaagaagatggcgagatcatcacttacccagatacattggttggtaccgactcacatacaaccatgatcaacggtatcggcgtacttggatggggcgttggcggtattgaagcggaagctggtatgctcggtcagccttcatacttcccagtaccagaagtcattggtgctaaattagttggagagcttccaaacggaacgactgcaactgaccttgcattaaaagtgacacaagttctgcgtgaaaaaggcgtagtgaacaaattcgttgaattcttcggacctggagttgcacagctgccgttagcggatcgtgcaacgattgcgaatatggcgcctgaatacggtgctacttgcggattcttcccagtagatgaggaagctcttgcttaccttcgccttactggacgtgatgaagagcaaattaatatcgttgaagaatattctcgcgcaaatggcttattctatacgccagatgcagaagagccaatttttacggatgttgtggaaattgacctttctcaaattgaatcaaacttatctggtccaaagcgtccacaagatttgattccactttctgaaatgaaagagacgttccatcagcacattgaaagcccagctggtaaccaagggtttggcttagaaaaatcagagctggataaacaaattgaatttgatctagcaaatggtgaaaaagctgtgatgaagacaggtgcgattgcgattgcagcgattacgagctgtacgaatacatcgaatccatacgtcttaatcggagcaggtcttgttgcgaagaaagcaagtgagcttggtatgaaggtgccaaactacgtgaaaacgtcactagcaccaggttctaaggttgtgacaggatacctcgtgaactcaggacttcttccatacttaagagacctcggatttaacatcgttgggtatggctgtacaacatgtatcggaaactcaggaccgcttgcgcaagaaatcgaggatgctgtctctgaaaatgatctgctgatcacttctgttttatcaggtaaccgtaactttgaagggcgtatccacccgcttgtgaaaggaaactaccttgcatctccaccattagttgtggcgtatgcacttgctggtacggtgaatattgatttaacaaaagaccctatcggtgtggataaaaatggtgagaacgtttatttcgatgatatttggccatcaatggacgaaatcaacagcgtcgtcaaaagcactgtcacacctgagttattccgttcagagtatgaaactgtttttgacaacaatgaccgctggaatgaaattaaaacgacagatgatgcactgtataaatgggatgaaaattccacatacattgataacccgccattctttgaaaacctatcagttgaacctggtaaagttgaaccgcttaaaggcttgcgcgtcgttgccaagttcggtgactctgtgacaactgaccatatttctcctgctggagcgattggcaaagacacacctgcgggtaaatacttgcaagaaagaggcgtatcgcctagagactttaactcatacggatctcgccgtggtaaccaccatgtcatgatgagaggtacttttgcaaacatccgtattaagaaccaaattgcaccaggaactgaaggcggatatacaacttattggccaactggtgaagtgacatccatttatgatgcatgcatgcgttataaagaagatggtacgggtcttgcgatcttagcaggtaaagactacggaatgggttcttcgcgtgactgggctgcaaaaggaacaaaccttcttggaattaaattcgttctagctgaaagctttgagcgtatccatagaagtaaccttgtcttcatgggcgtacttcctttacagtttaaagacggagaaagtgcagaaactcatggtctaacaggaacagaaacatttgaagttcatgttgatgaaacagttcgtccacgtgatcttgtcactgtgaaagcaattgatacagatggcaatgagaaaatatttgaagtggttgttcgttttgatagtgaagtcgaaattgactactatcgtcatggcggtatccttcaaatggtacttcgtgaaaaattggcaagcaactaatactcatacagcaaagaagagaaggcgcctagacagctttctcttcttttttaaaatagtggaggatcaatcatgtggaaaaaaggaatggcaatcgctgttttacttgtgttgattggtttacttgtgtggaatttacttgaaccaaaagagccagcaatcggtcttgaaaaaggggatcaagcccctgattttgaacttaaaaccctagatggtcaaaaggcctcgttatctgattatcaagggaaaaaggtgctcgtcaatttttgggcgacatggtgtaagccatgcaggacagaaatgccggatctagacgcaattagaagcgaatatgatcaggtcgaagtacttgcggtgaatttgacgaccactgaaaaaagtgtagatcatgttgcagcatttgcagatgaattaaagctgagctttcctattttattggatcaaaaaggcattcaagcacgatatcaggtgctttcataccccacgacatacatattagatgaaaaaggacgaatcgtgtctgtaaagcatcaaatgctgacaaaaaaagaaattgagcaagagctgggtctataatgattcagcttttttgcttattttctaaatgttttggcgaaaatgaaatacaaacactggaggtgagtacaatgagaagaagaaaacgacgtacatttgaagagcttgtacttgaaaataaaaaagaattattaagcaatgaggaatttttaaaccagcttgaagaaaagttggaagagcgttttagacagaaataagttatgaattatcctttttcgttcatcctaaagaagagggagggatgaatgatgggcagagagcatgataaacaagcgcagtttacaccagaccatttagggacaaaacctgtagcgtacaaacgtaataaaggaaaaaagatgcataataaatcaaatgaacagcctgatgtcatacagacgaagggcgaataaggagggaatcatgatgaatggaaagtcatatcaatccaatccagatgatcgttctgataatgttgaaaagctgcaagatatgatcgaaaacacccttgacaatatcgatgaatctgaagcagcgatggccctttcgacagatcaagaaaaacagatgatcaagcaaaaaaatgaaaatagaaaaatgagtattgatgccatgcgctctgagatcaaggacgaagaagcagcaagaaaaaatggctataccgaataaaccagggattcctggtttattttattgcctccttttagaagaaccatttcgattgtggtaaaatggcagagaccttaggttttgataggagagcgatgaaaacgtgtatgtatctaaaaaagaaatagaagtccgttatgcagaaacagaccaaatgggcatcgtgtatcatgccaattatttaatctggatggaagtcggcagaacagcactgattaaagaattaggattttcctatgcgcagctagaagcagacggcgctcttgcacccgttatagatttacaggtgcaatataaaaaaccattgctgtacggtgaaacagcgacagttcatacgtggattgaagaatacaatggactcaaaacggtgtatggctacgaaattcaaaagcctgatgggcaaacagcgattacagggacaacctcacatatttgtgtagacaaagaaacctttagacctattcaatttagaaaagcttttcctgcctggcacaaagtatacgaacagtcgaagaagcaggtttaattcatggcgtttggtattaaaagaagcgatctaaatgcgtggaaatcagctgtccagcaaggagaactggcctttttaacccattattggcttgatgaccgtttcccgcatgccaataccgtcactaaagcagcctgtcaggatatgaagcagttaattgagtggggagaaaaacatggactcaaaaaagaatggattcatgaccgcgcagggtttccacactttgacttgattggtgaaccacaaaaaagaatcctgcaaaaggagcggtctttaggaaacattcatgagtatgggctatatattgaaggataaaacaaaaaagatacccgagggatgaggtatcttttttgtttattcataatgaaactctggttctttcacggactcgttataatcaatatgcagatcatggttgtcaaaataccaaatatcactttcttcaacaaagaaagtaataccttctatttcagcggttgcgccggcattttgaggttcatcttttgcgacgccgagagaaaagcctttttgtacattactgcacccgccatatctcacaaaaaagcgaacttgatcacctttttctaaatctagttcatccttgtaccaattgagtgcatcttcttttatcgttaatttcaatgtgatcgcccctttttgaagtcatgctgtttttttaaatgcaggatgcaaaaacagcttttctttccttttaccacataatgaaacttatgaaacggctagagccatttgattttcggttcagttttgttgaggattcgtttgaggttggcgatgtgtctgtagatcacaaaaccagctagaacggcaacaacaatgattaagaatacgtctttggtgaaaatgctgtaaatgaatgtatagataccggtcagcatagatgatagtgaaacatatttactaatgtataaaaataagaaaaaagcagcgatcatcgtgataaataagaatggggcataaaataataacacgccgccagatgtagcgactgcttttccccctttaaattttgcaaagacaggaaagctgtgaccgataacagcagcaactcctgctaataagggatgaatgtccagttgcatgaaaaacggtaaagcagaagcaagggttccctttaaaatatcagctgaaatcacgatagaccctgcttttacgccaagtgtacgaaatgcattcgttgcacctaggtttccgctgccatgttcacggatatcgataccctttgcagctttcccgacaatgagaccggatggaatactgccgagaagataagccaaaataaacatcaaagcaattaacatctgcataactcctttatattctccctcttgtcttacattttaacatgatcttatgaaaaacatggggatctttttttgaaaaaatcaaaagcagatggattcagctttgtttttaagcagaagttcgctaaaatagaggaaaaggggtgtttggatgaatcatcctacgaaacaagaaattggccgtatattaaagagcagtaaacgaattgctgttgttggattatcagatcagccgcaccgaacgtcttatatggtgtctaaagcgatgcaagatgccggatatgagatcattccggtgaacccaacgattgatgaagcacttggtgtgaaagcagtcgcttctttaaaggacatcaaagatcctgttgatatcgtcaatgtctttagacgttcagagtttttgcccgaggtggcagaagaatttcttgaaatggacgcacctgttttttgggcgcagcaaggcatctatcacgaggaagcgaaaaggctgattgaggaaaatggcaaggtcgccatcatggatttatgtatcaaggtggctcatgcaatgacaaaaactcattaaatcgtcaaaaatccttggttttcaaggatttttgcttttttgttgcagaaatatatttgcgattctagaagaaagcgataaaataaggcgacagggacatagcggtgaccttgcatatcaagaaaaagagcgataagataaaggtagaacgtttgttctgttttgtgaaaaccatcatatgattgcatttggcttatcaaacagtcttgtttataatggacttctagttctgattgcagaatgtagaacatttctcatagccgtgcaaaagagcatgttttgttgattcacacatgcatggtgatgatgcagcttattaaagtggacagtaatgagcagcatgatcatcattaaaatctagagagatcatttgatggtttgccggttatgtttgttagtgaaaggggattaagcatttggttaaaaagcagcaagtagattataacgatgattctattcaggtgctagagggacttgaagcggtccgtaaacgtccagggatgtatattgggtctacggattcacgcggtcttcatcaccttgtctatgagattgtagacaactctgtcgatgaagtgctcgctggccatggagatcatatcattgtcaaaatacataaagataacagcatttccgttcaagataaaggacgcgggatgcctactggtatgcataagcttggaaaaccgacacctgagatcattttaacggtccttcacgcaggcggaaaatttggtcaaggcggatataaaacaagtggtgggcttcacggagttggggcatctgtagtaaacgcgctgtcagaatggctcactgtcacaattgaacgcgacggctttatttatcatcagcgctttgaaaacggcggaaagcctgccacatcacttgaaaaagtcggaaaaacgaaaaaaacaggaacactgattcattttaaacctgatccaactatgttcagtgtcacgacctataacttcgatactttatcagaacgtttaagagaatctgcctttttattaaaaggattaaaaatagagctgattgatgaacgacatgatgtacaagaaaccttttattatgagacgggcattgaagccttcgttgcttatttaaatgaagaaaaagatgttctgagtgaagtggtctcatttgaaggagagcatcaatccatcgaagtagattttgcttttcaattcaatgacggctactcggagaatattctttctttcgtcaataacgtcagaacgaaagatggcggtacgcatgagtctggtgccaaaacggcgatgacgagagcctttaatgaatatgcacgcaaagtagcccttttaaaagaaaaagacaaaaatttagaaggcactgatattcgcgaaggactgtcagccattatttctgtcagaattcctgaagaactgcttcaatttgaaggccagacaaaaggaaagcttgggacaagtgaggctcgctcggctgttgatgctgttatttctgaaaagctggcttatttccttgaagaaaaccgggaaacagccactcttcttgtgaaaaaagcgattaaagcgcagcaggcaagagaagctgctagaagagcacgtgaagaagcaaggagcggcaagaaacggaaaaagtccgaagcaacactgagcggaaaattaacacctgctcaatctagaaacccagcaagaaacgaattgtacctagtagagggcgactcagcgggcggatcagcaaagcaagggcgtgaccgtaaattccaagcggtgctgccgcttcgtggaaaggtcatcaacacagaaaaagcgaagcttgctgatattttcaaaaatgaagaaatcaacaccattattcatgcgatcggtggaggcgtcggtgtcgattttaatgtagaagacatcaattatgacaaaatcgtgatcatgacagatgctgatacagatggagcgcatattcaagtgcttctactgacgttcttctaccgctatatgaagccgctgattgagcatggcaaagtgtttattgcactaccccctttatataaagtcagcaagggctcagggaaaaaagaaatcattgagtacgcatggtctgatgaagaaatggatgacgtactgaagaaagttggaaaagggtacacgattcagcgctataaaggtttaggtgaaatgaacgccgaccagctatgggaaacgacaatgaatccagaatcgagaacacttgtcagggtcaaaatcgacgatgctgcacgtgtggaacgccgcgtcacgacattgatgggtgacaaagtagaaccacgacgtaaatggattgaaaagaatgtcgcctttggacttgatgaggaaagcaacattcttgaaaatgaaaacttgtcgctagctgaggaggtttaaacatggcacaacaagaacgatttcatgatttaccattagaagaagtgatcggagaccggtttggtcgctatagtaaatatattatccaagaccgtgcgcttccagatgcgcgagatggactaaagcctgtacaacgaagaatcttatatgcgatgtacgcagaaggaaacacgcaagataaaaacttccgtaaagccgcgaaaacagtcggtaacgtgattggtaactatcatccgcacggtgactcatctgtttatgaagcgatggtgagaatgagtcagaattggaaagtacgaaatgtgctcattgagatgcatgggaataacgggagtatcgatggagatccgcctgctgccatgcgttatacggaagcaaggctttctgccattgcttcagagctattaaaggacttagacaaggaaacggtcgaatttgtcgcaaactttgatgatacaagcaaggagccagttgttttaccagcgatgtttccaaaccttctcgtgaatggatcaacagggatttcagcaggttatgccaccgatatcccgccgcatcatctgggagaagtgattgatggtgtcattaaacgaatcgaacagccgcattgtacggttgaggatttaatgacagtcatcaaaggtccagatttcccaacaggcggtatcattcaaggggtcgacggcattaagaaggcttatgaaacaggaaaaggaaagattatgattcgcggaaaagcggaaattgaaaccatccgcggcggacgccagcaaatcgtgatcacagaaattccttatgaagtgaataaagccaatcttgtcaaaaagatggacgagttccgaattgaaagaaaagttgaaggaatttcagaggttcgagatgagactgaccgaactgggcttcgaatcgtggtagagctgaaaaaagaagcagatgcaaatggtgtcttgaatttcttatataaaaactcagatctgcaaattccatataactttaatatggtggcgatacataatcgtagaccaaccttaatgacgctgacaactatacttgatgcatatattgcccatcaaaaagaagtggtgacgaaccgctcagcatatgagcttcgaaaagcgaaggaacgccaccatattgtagacggattaattaaggcgctttccatcttagatgaagtcattgccacaatccgctcctctaatgataagcgagatgcgaaaaacaacttgatggagaaatatgactttacagaagcacaatcagaagcgattgtttccctccagttatatcgtttaacgaatacggatattacgcaattaagagacgaagctagtgagcttgatgtgcgtataacagaacttgaagacattttaggtaacgagaaaaagctgctaaaggtcattacaaacagtttgaaaaagctcaaaaagacatatgctgatgagagacgatctgtcattgaggaaaaaatcgaagaaattaagattaaccttgaagtgatgatcgcctcagaggatgtttacgtcacggtgacgaaggatgggtacatcaaacggacaagtcagcgctcctatgctgcatctaacggtaaggactttggcatgaaggatacagaccgcctgattcatcagtttgaaatgaatacaacggatgtcctcctattgttcacgaataaagggagctatatttattgtccagttcatcagctgccagacatacgctggaaagacatggggcagcatattacgaatatcatttcaattgatcgtgatgaatcaattcaaaaagccattccaattaaagaatttgatgaaacgtcgtatcttctgttctttacaaaaggtggaatggtgaagaaaacagagcttcttcaatataaagcgcagcgctattcgaaaccgcttgtcgccttgaacctaaaaggggacgatgaactcgtggatgttcatgtgacaacaggacagcaggaattgtttattgcgacgaagaatggctatggattgtggtttgatgaagaagaagtaagtgttgttggtccgagagcggctggtgtcaaaggaatcaacttgaaggatggggacgaagtagtctctggccagatcattgatccgaaaaacgatgtcctcgtgctgacgactcaaagaggggctgtgaagcgaatgaacctctctgaatttgataaaacatctagagccaaacgcggagttctgatgctaagagaattaaagaaaaacccgcaccgtattgtggctgttattgctgcatcactgcacgatacacttgagattgatacggataagggtgcaacgattccgcttgatatctctactttaagagcgaatgaccgctatagcaatggatcatttattgtagatgaggaagagcagggagaagtaacacatgtccttgtcacacctcaacctgcgccagatgacaataaataagcaaacgaaaaccccctgcgataaacagggggtttcttttatatacgggtcatttagctctcgtggttgccaaacatgcttgtaatggcgtgcactacttcaattccttggtagacgaaaagagaaagtgaagtgacagagaatagacctagaatgaatactcttaagaaaaataacatcgtgtaaaacctcccaatttttgttttgatttagatggttgggttaaacacgagatagtcggaaataagaagattgatagaatactgcaagtaaatgcttctttttccggtcaaattgatcagtatgagtgatgcgtgcaaatccagctgtcatactgccaatcatcagcagtactgtaaatgcggcaaatactgcgctcacatgtttttgtttcttttcatcgcccattgtctgagcgattttcatttcatgtgattcttgatcggcaaccacctttgcatgatggtatacctgaacggaatgaggcattgagaacaaatgaaaacttgcgagtgctataaataagacagctaattttagcagcatattttttttcatttttctcaccccttcctgtttattttcatgatcttaccacgttttctgttatttgaaaagtcttatttttttactttccctctttaaaaaagcgataaacatcaggacatttataggactgtttcacttcatgaaaggtttcaattttattttttaaatttaaaaaaagtgccatgatcgaggatcagacacttttagtgaacttgtaatgaacgcggttttgctacagcttttgtaaagattcctgcaatacatatggcgaataaaacaaaaataaaggcatgaagcagtcctacttgattggcaagcagccctaatataggcggcccagaaagagaggctgtataacctgataaggtcacaatgctgacgcgtttcacggcgtaccggctatcatcaccagctgcagaaatggttagcgggaagcctaaagaagcgccaagtccccataaaaagatcgatatcatacatacaacaagtgaaatctttaaaatgaccagaaatagtccggcggcggctgataaaatcgcaattcttagcaataacaccctgccgaaacgatcgatcaaacgtccgctgattagtctgccgctaatcatcccgcataaaaataaagcatagatgactgtactcatggaatgtgaaacctggtagccatccaccattgcaagtggaatccaatcattggcagacccttcgacaaacgcaagacataaggcgatcatcgcaagagagactgttcgtttgttcagccatggcgtttgagtatcatctattgtatctgactgcttctcatgctgatcctttcctgtaccgtgcggaataaaccgtgtgcaaatcaagatgctgagaaagaaaagaagggcaatgacaagtaggtgattcagcacagagacccctagatggataaaaagaatgccagctcctgctccaattaaagtgccaatgctaaaggaagcgtgcaatataggcaaaatggttttcttgatactgtattcaatttctgtcccttctaggttcatcgccacattgcacatacctgagcctgctccaaaaagaaatagaccggcagtgacgacaaagatagaagagagtgttgaaccaatggcaagagtggtgaatccaaggaacatcaaaaaagcactgatcacaatcgccacgcggccgcctttttttcgaacaaatacatttgaaagaacaagcccgacaattgaaccaacggataagccaagtaaaataagtcccatcgttcctgtattggcttgtaataaatctctgacttccggtgtccgtgaaaaccatgtagagatggaaattccagacatcgtgaaaatgactattatcgctttataccactttaattccatctaatccctcacatttaaagatgtatctgtcactgaacaaatctactcgattataaatgagatgggctgattcgtaaataacttgaggcaggaacatgaataattctagtcaaaagaaatcttgccttcccaattcttctgacgagaaggtaaaataaacataaagggggaggaagcatgaagtcatatcgtatcggtgtgttgaaaggagacgggattgggccagaaattgtacaagcaaatatgcgcatcttaaaggcagcgctatcacagtttcaggagtcatttgtggaatatgtcgaatgtccaattggctttgaagccatccattctcaccaagatcctgtgccagcatctactatagaagaattaaaaaagtgccatgggtggattttaggtcctcatgattctgcctcatatccagagatattgacagagaggagaaatccaagcggagagctccgtcatacgtttgatttatttgcaaacattcgtccatctcaatcattacctggggtacagggccttgtgcaaaacgtcgatctcgtgatttttcgagagaacacagaaggcttttatccagatcggaacatgtatcatggggtaggagagtggatgattacgccagaggtcgctatatccacaggtgtgtttaccaaaaaagcgattacacgtattgctcatgcagcttttcaaagtgcaatggagcgcaggcgaaaggtgaccattgttcacaaggcaaacgtaatcaaattaggatctggtttatttctgcgaacatgccaagaggtggcaaaagcatatccgcacgtgacagtagaagatctacatatcgatgcaatggcagctcacttagtaagacgtgccggtgattttgatgtcattgtgacagagaatatgtttggggatattttatcggatttaacaggggaactagtcggaagtttagggatcgccccttcattaaattgtaacgaaaaccaagcgatggcacaggcagcacatggatcagcaccggatattgctgggcaaaatatcgccaatcccatggggttaattctttctacagtcatgctttttgactggttatatgtgaaatatcatgatgacaggctgaaaaagacggctgttcttataagacgcactctggatgagatgatgaaaatgaacataaaaacgaaggatttaggaggaagcgaaaccacgacacaattcacagatgcattcattcaaatgatgaatcaggataaatagaagtgaaaaggaaaaaatgatccaaggagaacattatgtttctagtgaccaaaccctgatcgcagatcgagaaattgacatttgcataccagcaaaccaatcagccagaaaaaagaacatccattttaaaggaattagaggttggcgagcatttttttgcaaattttgatgcatcggctggacacccgcttgacctaatagaacgtgcaaaaggcattgaattcggcaaaccagtcaccattggaactatgtatggattggcggtggcgccattattaatccagatgtcacaataaatatcttgataaatcaaaatctggcgaataaacgtgggattttgattttttctttttttgtctcaataagataagtatacttagatttgagacaagagaaattcatttgtgctgtaacttcctagaatatatattatgtaaactagaagagctcaagtttaagttttggttgtattcataatttgtacagggacatgaataagggtccattcaggacgtgaacaagggttcattctgtacccccttcctgtcctgtacagtgaagtaaatgtagatacattgttctgttctaacccatacataaatttttgagattatttcatctcatttgttaatctaatgctataaaaaagcgctgtttctaaaacaagaggtgttgaaaatggatcaactaattaaatttgtgggcaaccgccttaaagaattaagaaaaactaagggctggacacaagaaagattgtcacaagaatcgggtattaaccattcctatatcgccgatgttgaacgaggtgattttcaactttttgttcttatcttatgtgcaaaatgctttctaaaagatgaggatatttcttctggcagcaaagttatacaagaagaattcaacttctcattatttatttttaaaaatataatagaggtatctacaacagaacgagtttcatttagtaactccttgaacttagtggtgttatgagcaacatgcacttcttttataccacatgcaattgccacttcatgtaaagaagtaacatcactagtacacgctaactgccctccagtagttgcataacagccgttatctaaaattataatttttaaatttttctgatttatttttgctacagtacttaatccacccaaattcattaataaagatccatcgccatctattacatatacattttctgtagttcctaatgctagacctagcccaaatgagataggcatccccattgaacctaacatgtagaaattattatctctttcattaattgatttccaaatttctgaagtctcacctaagggagatacaactagttcattacttacaaatttgttaaattcaacaaaaacatcaattttattcattttaacatctcttttcttggtaacaaaatgaacaccggttcattgtaacaagccactaaatccaaagcttccctaaatgtgttttctagctgcgaaatactggatatttcaaaaaatttgcacccaagtgaatctataatatttcttgtagcactaccaattacattttgaacagggttggtttcaaaagtatcatctccccttagagaaaccaatattacaaaacctattttgtatgaaatgcttaaagaagctaagctatttaaacagttacctaaaccagagttttgcatcattataattgctttttcattagcaattgatagtcctgagataatacctataccttcttcctctcttgtaactataatattttcgagtttatcagaatcatgaaaatcataataagaagctagtatagtacaaggtacactaacagcgtatttaatattgttactctctaaaatttgtcgaagaggtctcgttttaaggtctatcaaaatatttacacctccaagtaagcgcactccttattttctggatattcaatactttccgcgccaataaacttagcaaaccgttttaaaatctctcctatctcttttaagtgaaattctttttccataggataaaataaagttagtttgtttacttgtagttttttctcatttctaaacaatttcaaatctataactccgactaatctttcaccaattaaaatcggcattccgaaataaccaaactttctcttgtctttaggtatataactttctagacgataatccacattaaataacttttgtactcttgacctgtctctgagtaaattatcaaaaggagttaatagtgtgcatgcttcactctcaacttgagcaattttctcaagtaagtgaacatcacattctctaatataatgactctctccatcatttatcccattaatcatgattggtaataattttttatcactaatcataccgttgattatttttgatgtctcctttttattcaatccaaaatagtttttcgcttctttaattgtagcaatacctaaattttcaaatgctttatcaataaaatattcaagcattgtttcacttttgttctccactgtattagatctttcaggtggtaaactataaacttttctgaagttactatctcttttcactcttaataagtctgctctccataatttatctagtgcatttctcgtaggtgtgacttgccacgcatcatttgatgaagtcttgttgttagagtttatagattgcagtttctttttgctttttgctttgttataaatatctaatatgaagtctagttctgggtcctcttgtaattttgctttattatttgaatgagtatcaattaaatacgatattgaactagaaggtaatatgcataaggcgtataaatattgttcaaatattaaatctagtttgtatagatctagtaacatacttttcttataatctaatattctcgtccaaagaaatatatcctgacttcttgctgttacattcatagtatctagttgaatataacctaagtcatttagtaaagtattaatgccgttaattccagttaattcgcttttcttcaaaagcttttgtttatataactgaatttttactaaggtattgaagtttgtctttaacatttttaaaccccctcatttgtcatttcagttaattttgcggagtaattattaaaatgtttcatatatacagtaccaatgattagagtaataagagcaaacgataaaccaaagataagaaaaatgttacttacactttcactaccaaattgagtagtgatatgagcaactgttatagttcctagtggaaatcctaatgcaccggcagtacttaataaagtgaaaattctcccttgtttgttctctggcactagtaattgaaatatcgttctgttgtaaatcattgaaggtgcagatataagacctgctatcccaagcattaaggcaaagaaatatatattcataggcagtcctagcgttgagtagaaaactccatgaaaccctaatgataacaaaacaatatatatgggattaaacttagttttatatacaccaactaaaattgatccaatgatgattccaatagaagttgaagccattaataaaccatatccagtagcacctgcatttttggtttgttcagttaatataggtagtaaagtaggtgttgttccccatataaaaaggttatagaagaaatttaaaactactaaggaacctacgactttatctttaacgatatatgtaatcccattcttaaactcaataaaccactcaagcattcgattcttagaaactgtcttcactttttccttaacatgagaaaaacttcttaagaagaataataatgttgatgcaaacaccaataagacaaaattaatcaaaaaagcatacgggccgatttttgttgtagcaattatacctcctagcattggtcctataacgaatgctaaatcaaattgaatattcattaaagaattagcaggaagaagatcttttttggggagtattctgaacaatagcatagtctctccagatttcacaattggagctatcgaacttgataaactcaataaaacaaaaaagataatgaagtcaactgttgtaattaatgtcatattaaataataaaaataaaaatagtaaagctcttgttaaattagcaaaaacaacaacataaacaattttaactttatctaaaaaagtcccccaaattggtgcaaacaacatggatggcaactctaaacatagtagagaaatcgcaatgaacacaggattgtttgtttcttgataaataaaccagatgattgtgattacagctattgagtgtgctaatgtatttaaaaatgaagctaaaaataaaacagaaaaatatttatttttaaggacttcccagtacaatgagaacttactcatcccttatacctctttcttcaactatagttttaatttctagtacactttttggcattattattaattttgcaattacttcgtttcttttaattatcgcttttttcaacggttcaatagctaaagacataccagtacctgcttcattaaatctgtttaacgttctactttctaaaatacctgggtgtacttttattttatcttgaccttcagcgggtagtaacattgctatttgatcctctgtacattccagcccccagcctaacctccattcaaatgttctttcaccatttgggataaataagttatgccattgaccattcattttagcttgatgaagtctgaaccaaccgtcaggtttcaatcctagaaatacatcccccctcttaacccaatagtcaatgttcaatgtgttacccaaactttgcaactcttcttctttacaagataactggtattcttccacgggttcaacctgaacttctattggcgacctaatttcccaacttattctttgcgctaatacataaggtctgcaaaaacctttgattctttgattataaacatatcgaagatcctcaaatttttttgagtttggagactctcccttatatttttcaggtattattgaccaatcattcaattttaaaaatttagtaatattgttgctcacgttatccatctccttagaaaaacaaaaagaaggcgaattacgaattaccttctttttgtctaacattttaattggttgctttgacttcagtatctactactgattctacttttagttttacaggatcaaagatgttaatactgcatggtccaagcccagttttgatagtgccaatttgtttttgttcttttaaatcaataacagataggctgttcatgataggagaagatgtggttggaaaagttcttgagaaattagaaacgtaaatagtaccattttcctcgtctagttttaatcctctaggtgttaaccctgcatcaatttgtttctcttctttccatgtgtgcttgttgattacactcactacatttgaagcttcgcaacttacgtataagtaaggctgttttgaatcagatattacagctcttggaccgtaacctactttaacttctgcttctataacttcatctaagatgttgacaatcgatactgaatgaccgtgcgtgttagccgtatagacatgagtattgtctgcatcagaaaaagcatgataaggtcttctgaattcgcctaaagttatacgtgtagtctcataagagttttcaggttgatcataattaactttaataactgaaagtgcatcttcaccccagcaagggatattaacgtattctccactaggtgtaatagagagtgctctaggattgtttcctactggaactttcgtaatttcttcttttgtagttaggtcaacaattgatacatcatttgaacctgaattagaaacaaatagtaatgaattatcaggagagattactactcctcttggagctaaaccaacagttattttagtgacttcttttgaattcttgatgtcgattacagataccgtgtttccagcgcaatttgatacaaatccaaactctccattattttcgatagccattcctccacggggacttcctcccactggaattcttccaatctcaacattagtattaatgtcaataactgaaatgtcgttcgagtcagtgtttgttacataacctagctttttcaatctaaccactccttttgcgtgaattttcttacaattaagatataaacattttttgtataaaatgtcaataataactgttggattatctgtcatttaagcaattattagtcttttatgtatatgtttgtctataataagggtgatttccccaataaaatctcggatttattaaccatatatattaaaagtaaaaatggatccattgtttattactgtacataaatcttcaactttccctacgggtaatttaatttgtttcattcattccattaataaaccaatcattaaaaatttcaataatcacatttccaagatataacacctaaattttcgtcattgttgactttccaccaattttcagcattctctttatttttaatttgttcttttatataattattataaaagattttggacataactcgcgtgtgttacagcgtttccgatccatactaaattatttatcccggaagattttcttcctgcttttacagccaatgtttcttttgcagctaatcctattctagccttaatattaggtaactttctttcttctaataatttatttaactttttcataaaagtattattgagcttagcatctccttttagagttctgtcttcctcatataataccgtttattatgatgttttaatatttccctatatactgttagccagtgatacttgttaccatgattcctacaaaatttaagagcaaaacaaaaatttattaaatctcctgttcactaactggttgttctgactctaagaaaaattctacaaaatcacgtccaaacttggagatctcaaaattgtcttttgacttaaattttggctcttttaattttggtaatgaacgtttaaacttcggatttgtcaacttgtctaaaaaggagtgtagttctttaaatgcttttgaaatttcctcaagatcatccgtgatttccaagtcggttcttgttgttaacactcctatcctaagtagatttctacgaactgctttatactgctcatagcttataccatgtctgtccataatttcctgaaacgtttcttttgattcttgatcaattgcaaaacgagaaacatacataagtctaaggacagatatatccaccattctaagttcttttaagacgtcgtaataggttaggataaagtcattcgaaacatggtgatgttcagtaatattcacgaatccatttaccatatattggattttttcttcctgctgttcgtctataacgtaatccagcacatattgaaataactgatcaatctgttctttttgttcaaatgtttttaattctagatttaaacgaatttcctctattttagattgcaattcttctgtgaatgttttgatgtttctttcaaaacgggtacgtttataactttgaaccgcacctgagatcccaggaatgagtgaacttgctgcatcaacaagaatatcacctgtcatgcttgttaaagattcctttgcaatatcagcagctgtgtcactactaacatttaaaaaagtatcaagagctaactcacgccctgtttgttggatatctttccttctactgtcattcaaaaataacctctccttttgatttagatagaacaatgtgctttcctagatattctattttttcagccgtgaatgtaattctagtcagacccctttaaatccttctaaaatcattgtacttgtgtacaaggacatgaataagggtccataacctcttctccttttaagggtttaaatacctttaacttcccctttaaaattaaatcttctctttcctgtttcaatcgatcacaaggtaaaaaaaatagactctactcacttaaatttataaatgaggtggagtctatttttaactttaaatatttttcattttgaagcgatatatctgcttatttcaattttttagaatgtgaaatcttattttatgtcttttgcttattttacaattaaaactggacagtccactcttttggctactttatgactgacgcttcctagaaccatttcttgaaaagagtttaatcctctgctccctataataactagattaaaatgattgtcattggcataagaaacgattgttggaccgggatcaccatgtttcatcgttagtttataagggaattcttcagttttaaatttttcctctatttttttcagcttctgtcttctagcttgctctagcgcctctgcgcttccactatgcaacacttcacttttagatttagcataatccaaaatataaatgatctctacttctgtatcagtcgttaattttcctaattggatcgcatggtcagttgatctttcagaatggactgaaccatccacagccaaaagtatttttttatacatttccatcccccttattaatgacttgatgcttttgcatttggttgatcataggtagctaatttctttattaattttttgctggcgtcgtttaatcctgttagaagaacgtctttattgttttctttcaatttcaatacgactttatcgaccgctgctacagctgaatcatcccaaatatgggcttcagtaaagtttaatgtgactttttctttttgttgatcactgaaagaaaatgatttaacaaaatcctgtactgatgcaaagaatagttgacctttaatatcgtagactgtttctcgatctgaagagtttgaagaaacttttacatgaacctttgatattttggctacaaaaaagatagcacttaaaatgattcccgcaaaaactcctttagacaaatcgtgagttgctacaactgtgactaccgttacaaccattacaatagagtcagttaaaggaacttttgtaattgttcgtaatgatgaccaatcaaatgtaccgatagaaaccataatcatcacaccaactagagcagccataggaattttcacgacccaatcaccaaggacgataatgagaaacatcaagaaaacacctgcaacaaatgtggataagcgtcccctacctcctgattttacattaatcactgattgaccaatcattgcgcatcctgccattcctccgaagaatccggcaacaatattagcaataccttgaccacgactttccttatttttatcactttctgtatctgtcatatcatctacgatagatgcggttaataaagactctaaaagtcctacaatagaaagtgctaatgctgttggaaagatgatcatcaatgtgtcaatgtttaaaggaatattaggaatcataaagcttggtaaagaacttgtgatttttcctaaatcgcctacagttcgtaattcgagatgaccaaaaatagctaaaacagtcattgcaacaatggcgacaagtggagcaggaaccactttagtgaaccggggaagtatataaataatgagtaacgtaaccgcaaccacgatataagtgaggttcgatattccaacaaaatgaggcacttgtgccataaagattaagatggcaagtgcatttacgaaacctaccataaccgatctaggtataaatttcataaagcgagcaattttaagtgcaccaaatatgaattggatgatcccggttaaaattgtcgtagcaaataaatactcaatcccgtgatctttcactaaggtcaccattaacagggccatagcacccgtagcagcagatatcattgcaggacgaccgcccataaaagaaatgacaactgcaatacaaaaagatgcataaagtccaaccatagggtctacacctgctatcaccgagaaagcaatagcctctggtataagagcaagagcaacaacgattcctgctaaaatatctccttttacattgggaaaccattcattattaagtttttgtgtaaacaaaacaaaaaacactccttcttattaaaattgacttctaactctcatagaagtcaggtccgttgataacatcttcaaatttaacagaccaggatttaaaagtccatcattttttgtcccaaaaacgaacttttttggtgctgtaaatcattgagaaataatcaaattgattttttgttataattacagtaagcaattttttggagatgataaagtgattttcggttatgcacgtccatttagtcaggatatagatatgtctttacaaacgaaagctcttaaagataaaggttgtgataggatttattatgaacaatcaatatctcctaaaaatagacctgaattaaatcaattattgcaatctataaaagctggagatcaaatagttgtttataaattttatagtattgctgattctacacgacacctaattgaattagttcaattactacagcagaagcatgttcaattgatatctatcattgatcaagtagatacatcaacaaatgaaggtaaagtgttttttaagcttatgaagagtgttggagattttcaatatgatgttttaagcgagagtactaaggcaggtatttatgaagctaaacgaaaaggaaaaaatacaggtcgccctagaaagcctgatgctaatgtcaggcgagcattagatatgtatcaaagtaaaaaatatagcatcgctcaaattacactcgagacgggtataagtaaaacaactctatacagatatttagaggatgaagggtgaactttctcttaccaaatgaaaaagggttcgttgatctgaaccctccctttcatcaaattaagttctatttgcattgacataagttaaatctgtgctacttttttaaccatttttcttctgcgtacattcttttcttggaaatatctttgaaaaagagcaactgggtcaccaaatgaggtgagcccaagttttgttgacacttatgaatatctcgaatgttctttcacgttactttccagtctcagcaaactgtttcaatcgatctccaatttcatctcttaccctttggaaaaatgcccacctctcttcttctgttccttctgcttttgctggatcatcaaagccccaatggacacgttcgacatgtgggggagtcatcgggcatttatcagctgcatcaccgcatagtgtgacgactaagtcagcattttgcaatatgttctgatcaatcaggtcagacgtttgattagaaatatcaatccctatttctttcattgcttttacagcattcggatttaatccatgagcttcaataccagcgctatagaccttccactcatctccaagatgttttttagcccaaccttcagccatttgactgcggcaagaattaccggtacataaaaagtaaattgttttctttgacatgttgatcgtctcctttaatgtataatcattagccagaaatacaaagctaaaagcgtgatgaatagtgttggtgcagttaaaatgactcctattttgaaatatgtgccccaggaaatcttcacacctttttgagaaaggacgtggagccacagtagtgttgctaaggagccaatgggcgtaatttttggtcctaaatcagaaccaatgacatttgcgtaaattaacgcttctctcattattccttgtgtatcggtaccggatatggctaatgcatcgatcatgaccgtcggcatattattcatgacagatgaaagcattgctgcgataaatcccataccaagagtccctgccaataaaccttgatctgctacagcttggatcacgcttgaaagagcatcagtgagccctgcatttcgcatgccatagacaacaacgtacatacctatggaaaagaaaacgatcgcccatggtgcttcttttagaacgctttttgtttggacagcagggcttttttgtgcaatgaccaagaataaaatggcaatcacaccagctatgactgatacaggtatagataaaaattcgcttgcaaaataaccaatcaacaaaaaagctaatatataccaagataatctaaacatctttggatcttttattgcttcactaggatgctttaactcagtcatatcatagcgtttaggtatactctttctaaagaaaaggtacagtacagtgatactcgctagcaatgaaaaaaggtttggaacaaccattctggatgcatattcaataaacgtaatgttgaaatagtcggctgttacaatgttcaccaaattactaacgacaaggggaagcgaagttgtatctgcaataaacccactcgcgataataaaagggaatacaattttttcattgaagtgtaatgctctgaccattgctaaaacaatgggtgtcaaaataagtgctgcaccatcgtttgcaaataaagcagcgacgattgcaccaaggatggtcacatacacaaacatacgcagcccactgccttttgcagcctttgccatatgcaatgctgcccattcaaaaaagccgattcgatcaagtatgagtgagatgacgataatggcaacaaaagctaaagtcgcattccatacgatgcctgtcacggtgatcacatcatcaacattcacaacacctacgattaatgctaaaatggcccctccacatgcggaccaccctatggataaattttttggctgccaaataaccaataccaaagttaacaaaaatatgagtaatgataaaacggcaaaactcaaacccatccctccctacgaacaagaaatgtttgttgctttatgttgtatactttttaaaaggtcatcttctttatcaatttgatttaagatgatacgaatcgtctcaaattctggagacagtgtattgattgaataataacgccactgcccttttctgttctcatgaacaaatccagctttttttaattttcgtaaatgctgactaatcgctggttgactcatttcgaacatatctaccagttcacaaacacaatattccttctccaaaaacaatttcatcataatgagtcttgtttgatcactgagtatttttaaacaattcgacatatgtaacaaaccaattgaaacatctgaagtcacaatgattccctccctcttttcaaatattggtgacggtccctgttatcaactcctccaatattatataactgaatacttatataatcaattgattatatggatttgaacaaaaatttgttcgcgttaaaattattgattaatgtttatttcttttattttttattcatcaaaaaaattgattattgtagaatccttatttgactattgtttataaagcaaaaaatggatctacatttctttcaatggtctgtcatatgacaattcctattcttatataaatcccaatggctcattttgttgatgcgctagctccattcctcctaccaaatagagagcgttctttttatttatatcatcatcaggccaagtgcggattagttgacgcaatctaactgtaacggtcttacacacatctggcattaagtaactatcagaatcctaaagatccagcaatggatatgtcatcttgatagttttcaaatggaagtcggtgtaagaccaatctgcttcacaatggcggatttccatattttcaaagagagacaattctaatagggttattttgatttaatccctgcaccacaaagaggtatgacaatggtttcttctgattcctttttatatttcatgtagccagccaaattgactgcagatgtcacttctacataaaatcctttctcacttagtttagagcgtgcatttagaatctcatcttctttaatatcaataaacgtaccattggtatctagtacagcttctaaaatttgtttggagcgtgctggagcagcaatggcaatcccttctgctaaggtccctttattcgtcacaggtgatgctgattcctcttcattttgataagctttcacaaggggtgcacagtttttcgcttgtacggcaacgattttcggtattttatgaatgaaaccattttcaaataactctttaaagccataatacgcacctaggaggagagtaccgtttccaaccggaatgattaaagcatcaggtgctccttttagttgctcatagatttcataggcatatgtttttgttccttcaaaaaaataagggttatagacatggcttgcataaaaaacgttttcattgtctactgccttttgtgccgcagctgcaatgtcctcacgtgtaccatgaattgttttaatcgctgctccatgtgcttttatttgagcaacctttttaggcgaagtttcatcgcttagatagatgtcacaggcaataccacaacgtgctgcataagctgcaatcgccgttcctgcattcccactactgtcagcaatcacttttgatacccctaattctttagcctttgtcattagaacagcggctcctcggtctttaaaggataatgtcggcatcatataatcaacttttacataagtgtttggctcattagggtctagaacgattaaaggggattgaccctcccccattgtgacagtttcccaagtctttgaaccttttgtaaatggcatggtttcaacataacgccataatgaatttggatagtcatcccaagctgcaacatctattttcggagtatctttcaccagatttaatactccaccacaatcacatttccatagagttggtgtcatctcatactttctcccgcaatggttacaaatcaattgattcatcgatcatctaccccttcgaatatttttttatatgaaatataattttttatatagagtaggcaaaaaaatatcttaaatatatgcaatggcatcaatttcaattttgaaaccaaaatgtaattcattcgttggtacaatagtacgtgctggtttatgttcaccgaaaaaattagtataaacagcatctactttgtcccataaatgaatattcgaaatgtataatgtcatgcgcaagatcttctcttttttacttccagcagcctctacaatcatctctacattcttaagcgcttgtaatgtctcttcttcaatatggccgaactctttttctctcgtttcgggattgatggcaaattgtcctgaaacatagaccgtgttttgatgaatggttgcgaatgcatagtgtccgtttgattttagatttcctacctcgagtatgcttttcattttgacactccttacctcgatttatttttgatttcatccaaatagctatagacggttactttggaaatgcctaacatagatgcgaccttctcaacagatcctttcattaaaaagatgcccttttcatccataaatttaattagttcaattttttcatgacgtttcatgactggatgaacactgttttgaatgatttgttgaatcaattgatctactatttcttccacattttcaagatcatcatttgatgttgtttctttctcttgagctgccacttgtgtagaaagaaaagtatccataaattgctgcatttgatttagtgcttcaacatcaaaattgatacagaaagcaccaatcaccttttgctttgaatcacgtattaatgaagtcgaagaacgaatcgtacgcttatcttctgttacaaatgtataaccagccagataatcttctttaaaatcttctgattgtaatacagtctttactagatgatcaaatgattggccgatttctcttcctgtcacatggttatttactgtaaacatgacagatgcttgagggttcgttaaatcatgaataaccacttcgcaatttggtccaaacatttttgcagtagattttgctaaaggaatataactctctaataactttttaatatgttccatgcctaagcacctcatttttttattccactagattatataattttttatatataaaaacaatatgtagatttatttatacattatgatgattacaagatcacaaatatgaaattcaccatataaaaaaagcagccattgactgctttttacttgtgctcctttctaattgtctttttgctggattccatacaaaatgacgtcaattccccatcggaatcgttccattgaaacgggatcacctgcaaacatttcttcttttacacgatgaatgaaaggaaaacgcgtcttgtctgcatcatgaaatgctttttttgtgtctgaaacctgcgaagagtcatgttttttccaagagaccttttcgtatgctaccgaagatacgtataacagcaataggtctactccccatgcagcggatgtagatttgatcccgccttcatgcaatgcagcgagaatatgttcggtcaactgaagaaagttcgttccttgtggaatggtggaaagagaaatttcagcaagaccaggtttttcaaatagcagcaggaaataagtatgcaatatttcacataacttttctttccatgtgccatccactgaatctggataaaccatttggccgagaccataatccaatacgtaagcacttagttcttgaaaattgttcacgtagacatacaaggatgcaggtcccgtatccaatgctttagccaccttacgcatactcatgccctctatcccttgctccttaagaagcgcataggcagttttaacaataagctcacggcttaagggctctttagccggccgagaccggcgacttataatacgacgatttgaattgttcatactctctttatatcatgtcaaagtaaaatagtaaattgagcatcaatcaccgtttacttgaaaagaattcatcatatctgcaagcttgaccgcagcgtcttttgaaaaacacagttttaaactattctccgattcctgagccttttccgatgaatattcatacatcatttcttcgtactcttcaatagccttttcaatatcattaggatgtcggacaatagcaagtgcaagctccattgcatcaaacatcgccatgtttacaccctcacctgcgaatggtgtcatgagatgagctgcatcaccgataagcgttactcctttatgacggttccatttaaaaccgacaggaagcgtataaatacgtcttggaatgatgacatcttctgcataacgaatataatttttcagctgatcatcccaatcactaaataactctaataatggttctttcgcttcattcgcttgattaaatggaatgccacaagtctcgatccagctgcgttctaccataaggcttgcatacacttttattcgtccatctccgtttaactgaccaataattcctttgtgatcagctaaagcaaacattttaccacgtttattaaattcagctaaatcagggtggttcacctctacgttgaggacattcagttcaagcatcgtgagcccggagtattcaatatcaatatctgttaacagtggacgtacacgagaaaatgcaccatctgctccaatcaaaaggtcaaccgtctcgacaaccccgttttcaaaatgaagttctgtcatgccgttttctaatgaaacacatctatctagtttatatccgtatttgatgttttcagcatcaatttgatctaacagcattttacacaaaacaccacgatcaatttctggccgagtgcctttttcatgtgattcagtttcttcgtctagatagattctccctgctttatcaaataatcggaaatcttctccttcatagcgagcgttcttttgaaatttctcataaactcctgcttcctttaaggctttttgacctgtttcttcgtgaatatccagtgagcctcctctttcaagactcttgtcatgcatctcccgttcatagatggttgtttgtataccgtaattttgcagaattaaggcgagtgttagccctcctggtcctcctccaatgatagcgatttgcttttgttttttagataatgtctgcatcgtatgcatctcctcttctttatggaagtagtgtaaaaccacatctcatttatattataacgaacatcgttcgtaaagaacagtgttcgtttaaaatggtttatttcatgaatgtgtgctttaattgtaatgaacccaatcattcgacacccaaaggatataaattggacacttcgatttagggattttaaaggatttcaaatcataacatgattcttagatcagtcggttcctaatgtttcaatgctgagtctgcgaggtgtttctatgaataaattattggcaatgttgatattaggattgagctttagtggtgctgctctcattctttctgtccctttgttattcaaatccaaaccagaacaatttgagctgatgtttgctgctggatcagcaggcgcattcgcagtatttgctgtctcatgcctagtttttcgaaaacaattcaatcgctcattagaacaatgaaaaatcgttttttgcggcgtttattcactatatatctttttgagttggatcaaatgtttttatcttgtctgctatcatcttcctgtttcattcaagatggctgtaaatgtgctattactaaatatcaagccttttaaagtcacgctacctgaacgtcttcaattgatcgaaacaaaaataagccattgattcaatatggcttatcatgtaaaactatattcagtcacagcaaactgctgtaatcaaccccaaatttcatctctcaccctttgggaaaatgcctatttctcttcttctgttccttctgcttttgctggatcatcaaagcaccaatgcactcatttgacatgagaatgagtgattaatagacaatcgtatccctattcgttatataataacattaaaaatttcatgtggttgaaagtaggctaaggaatgtttaaatttgatcattttttaagtaaaccagtaaaattaactcctccccagattttattgtttggatttttgactgttattgtaataggatcctttcttttgtctttacctatttctacagtcaaacctatccccatcattgatgctttctttacagctgtttcagcaacaactgttacaggtttagctgtggttgataccggaacaacttttactttattcggccaaatagtcattatgctgatgatacaaattggtggtcttggttttttaactttagccgtcatggtcatccttttgcttggcaaaaaaatagggcttcgtgaaagattgttggttcaagaagcctttaacctcacaaatattgggggtattgtacgtcttgtaaaagtattgtttatcttttcaatgacttttgagttattggcgacgtgtatattatcgtttggatggatacctgaatatggctttttaaaaggattttatattagtttatttcatgccatttctgcttttaataacgctggattttctcttttttcaaatagtttgatgaactatgtcaatgatccactgatcaacttgacgattaccctcctgtttatcatcggtggtcttggatttaccgtgatttttgatatatgggataaacgtaaatttaaattattatccatccattcaaagcttatgatcataggaaccctcgtcacaaatggtgttgcactattattgatattcttaatggaatttggtaatccgcatactttaggtccaatgaatctttttgataaattatgggcgtcatattttcaagctgtgacacctagaactgcgggctttaattctcttgatatcggacatatgcatgagagttctttaactcttatgatgcttcttatgtttattggggctggtagtgcgtcaacaggaagtgggattaagttaacaacaatgattattattgtgatttctgttctccactttctgaaaggaaataaagaacccgttatatttagacgtacgattaagcatgatattgtcatcaaagctttagcaatcagctttatcagtttatgttttgtgtttatcaccattttcttattgacaatgactgaaaaagctcctttcattgatattgtttttgagaccttttcagcatttggcacagtaggtctttctatgggattaacgcctgatttaacgtttttaggtaaggtgattctttcgattctgatgtttattggcagagtaggttctctgaccattgtatttatctttatgaaacgaaccaaaagcccaatacgttatccggagggagaagtatttgtaggctaatatgagcaatgattgaaatggttcccttttaatttaatcatcaagatgatggattgatccactttacatttttttctcttcattcactacaagctgtttggaatatggtacggtctcttcttttccaaacaatcagcattcggtatttaacggaaaagctgagatattcaactttaagctgacgcttgaaacggctttgatcagcagcttctccgttattacttattgctcgttttcttgattaagtccacgccatcatatgacaggctttccacacgtgcagccttttgcagaatgtaatgatcacaaaaggtcttcgtataatccgtcataagatttcgcatatctaatgcatcccttgtgcctctgagttcctcatctacaccggtaaacacgatgtcgcagtaatctaaatgggcagcgcgatcaacagagaaataaaaggtttccatgctgttgttcacgccaatgagcgcattcatatgatagttaggttcagaaaacaacagcagaaaaggtttattcaggtcgctatcgagaaggccgaatgccccgctgtccaagccaattccgcaggaaaaccggtcgtcatcccggcaaacaaccgctgccgtaggtcctccataagagtgtccgacgatgcccatgccgacgtcaagcatcagtctgtcatgaaagatagaatccaattcttcagagtttagtttgtgaagatgatcggctacgtaccttacatcttctgcctgtcgttcactatataatgttaactgattaatgattggcagagccaggacgttacggcacatctcaatggccgtttcatcgtcaggccgcatcttcatcttgccagccagctccatcatctccggatcttcagaaaacgccataatgacatccgaaaaatcctttgatacattcaacagcttcccatctttccgtttatacattgtgctattctgatggccgatactgacgacaacataacccaggcttgccaggtctgtacagatggctgtcccccattccggtgaaccgcccccgccgcaaacataaaataacactggatagcgctttttcttcccagaaagagcaaggtcgtcgtaacaatgagtcttgatatcgatagagaaaaaattcttctctttcagatactcagtgacaagtggctgctcatgaagcatttcgtagacttcaggaaacatgtacgttgatggagtcttcccttcgctgctatcggacggatagtacacaaacgcggtcaattctctttttgagtcatctgatgctgtgtactcaaaatccatctgggtacgagcggcggtatagctgccgattggttctgggaatgtgtcataccttttcatccttttgttcccccttaataaatgaaagtgcgaatgtgaaatacacatggcgatataagtgctttcaaaactgtaaaatggttacatccaatcttcagttcatcatccttattccttggcttccttgagatcgctaacaacttcagcatatttatcatctctaagaagcccatgacccataaagtcagcaaagtacttgctcatcttatgctgcaggttagaatccttaatatcgaattccctaaaaaacatgactaaattaaactgcatagattcaaacataaaagaaatgaggtcgtcatcaatatcaggtcgtagatatccatcaaccctcatgcggcgtaacatgtccttgattaaggggaatgactcgccctttagcacattcaaatatacttttagtaaggtgttctctggaatgtgtaaaaatgtttcaacgagtttgatttccagttcattcaatggctcagtcgcaatgccattagtgttgtcaaataggccagtaaggaaaaattgaaaaagagaatcttcattgttgttatgaaaatacgcagctcttttcttggtcacatgtcgtattaagagacaataaaggtcatctttgtcttcaaaataccgataaaaagttccgggatgcatggacaaacgatccaaaaccatcttcatcgttatatcctcgtaaagatgatcaacaaaaagatgcatagcacgattacatatgtcctcacgtcttgcttcatccaatcgaaagaaagtattttttggcataaatgactcctttatgtaaagtgtgaactcattcacaccatatcgataattgattcacatgtcaagctgtattgaaatagataccggctctttgctcggagggatttcaccccaacggtagtacgattgatcatcgtacctttattcgttccgacttgcgctctgtggacattgccaaaatcaaagccgttttcaccaattgcgaattctcctcctgcgatatgagaggaatgacattggagaatgctatgtttatcgattgtactttttatcaatgtagattcaatgaccgcgttttacaggcagcgaatatcagctagttgatataacgtttgagggagtggtgacacttcgtcaactccagtgaagaagtgaacattcattatattaataggaaatatgtatgttttaaacaaaaattggaatttaaggattacttaatccgaagtgaattgacaatctgaatgtatttcatgttgaattgaaaaaggctgctttcaagtaagcagcccattcactaaactttcgactatttcaatcaaatcattctgcatctttttgtgtgaactcaacccctaacgagtgatcacctgaatgattttctcctgagcatcttgtgcctcagggattggcatgacaacaaatacatgaagcatttcaggataaacaaaggtttttatgtcaattccttgttctgttagtttttcatcaagctttatggcatctggatataacatatcatgtgttccaataaaatgagtaatcttcccaagtcctttaaagtcaccgtaaatgggactgatcaatgggtcagttacatttttatcagctgtccaaatctttgaaatgacttccattccttcaggacctagaatcgggtccttttttgcatattcaaacatgagaggattgtttaagctcatgtcaacacatgcagataataaaataatatccttcggctgcggcagaccttccttctttaaaaggtgcgccagaccaagtgagatatttccgccagctgaatctcccatgatcgtcaattgattggcacttccggcagttttcagaaggtctttatataagtttaggattttcggataggtattctggcagctataatgaggcacttttgggtaaataggagccaccactttcgcattgagtgattgcgccatcttatccatgaaccaccaatggaaattcaaaggctgatttgtccacgcgccgccatgtatatatagaatgactttttgtttttgtgacgtttggtcattcaaagtgaaaacttgcatgccttcgaatgtctgctcttttatctcactaattaacttcacatcatccccaatggcataaggcttcgtattttctattcctttttgatcaagaaatttttttgtgttttcaatactagaaaaactctctttattactttgggaagcgaataatttttcaaattcaatactttcttcagaacgttctccatgatatatttctacactcatttttttctctcctttcactcaatatgatgattgatcatcctcatttggtacacgaaatgattccaggtagacttgtacttttttttcgggggtctttaataagttagataaaaggtcttgaatgagacgaaggcttttgatttttctttcaatttcttcatgtttaagatggacaatttttcttaacgtatcaaggtctatgtcttgacttagcatttccataatctcagctatttcctttaatgaataacccagcgttttcgcatctttgatcaattgaatcttcacaatatagtcttctgtatagaatctgtaaccgtttgaacgtcgtcttggagcaggtaatatgttgtgctcttcatagtaacgaattgcggcaggacttactcctgtttttttggcaagttctcctctagtcatcaactccatcgttactcctttttcattattttgtcttactatatgtacattataaaggttgaactatacatcaaggtcaaggtgaaacatttattggccagcttttgctttcagattagtggagcgaagagatcgatagtgctagctataaaatgatttaggtttcttttcgtaaacaaataaaacaccatcgtacccggcaaataaagccgggcgcaatgatgcttttcatcattcaatctggattatgataaatcttctccatttgttgcaatcacatttttgtaccagtaaaaggaatcctttttgtaacgattcaatgtaccattccctctatcgtcttgatccacatagatcaaaccatagcgtttactcatttgagaagttccgcagctaattaagtcgatgcatccccaaggcgtataccccattaaatcgacaccttctttgactgcttctttcatctgttcgatatgttgttttaaataatcaattcgataatcatcgtgtattttcccgtcttgtgtcaatgtatctcttgcgccaagtccattttcacaaacaaacaaaggtttttggtatctgtcatacagtttgattaatgaaatgcgcagacccatcggatcaattggccaatcccattgtgatagctccaaatgctcatttttgattggactatcaaatgtacccgctagctcagctgcatcttctcgcgcttctgctacgtgggacatatagtagctgatcgccacaaaatcaacaatgccctctttcaaaatttgctcatcctgctcttcaatatccagctttatgtcgttgtctgcgaaatatttcaccatgtatgttggatattcacctctagcttgaacatctggatagaacatattcaattggttcgattttaccgcttgcagctggtcctctggcttcgttgtttttgcataggcttcaatttggttaatcatacagccaatttgtgcatgcggaatgatttcttttgctgccttcactgtgagagcgctggcgataaattgatgatgtgatgcttgatacgcagcctgtaatttatggtctactagatcctctaaaattccagcaccggtataaagactgttgaggttcatattcatttcattgaatgtaatccaatatttcactttatttttatatctttctaaaatggcgcgggcatatttttcaaacaacggaacaagctctctactcatccagccattatatttctctgttaaagtaatcggcatttcataatgagacatcgtgactaacggttcaattccatatttcgcacattcatcaaatacttgatcataaaaagccaatccttcttcgttcggcttttcctctaaaccagttgggaaaattcttgcccatgatatagacaagcgaaacactttaaagcccatttctgcaaatagtgcaatatcctcttcatatcgatggtaaaaatcgattccgcgtcttttcgggaaatcaaattcatcaggttgttccttgtatctttttaattcagctgaactaacatcgaaagtaaagttgttcacttttcctttttcataaggatctttaaatgcagcaaagtctgacgtcgataggcccttgccaccttctaagtacgcgccttctatttgattggcagcagttgcgccaccccataaaaaatcatctgaaaatcctttttttacattcttcatttcaatcatcccttctctttatattagtgaataagcattaagagcttattttgacctgcggtgacatgagcgtcacctgtatgaatcacatcaaggtattgcgttgaatttgtgacgataataggtgtcactacatctaaatggtttgattgaattccttctatatcaaacgataataaatgatcgccggtcttcatctcgtcgccctcttttaccagtacatcaaagaattggccatttaggctgacggtatcaatccccacgtgaatcaataattcaattccatcatctgaaacgagtccgatggcatgtttagtaggcgtaacagtcactattttgcctgagaacggtgcttgtaccacccccttatcaggcaaaattgcgactcccttccccatcatttcacttgagaacactgaatcattcacttcagataaaggaatgacctttccactcataggtgcttgaacttcgaatgggcttgtttgcttagacatttgttgattctctgtactcacagtgtgatttggcttgtctgctgcttgctcgttaacggccgtgacagattccttaaatccaaggaaaatggtgaagagaagtgacacgatgaagctcaaggcgattccaatcagagccagctggaaattattcgtccctttcataatgtaagtgggcagtgaagtaatgcccggaatcgaaaaggctgtcgttttaactgaaaataaaccgtaaaaacatccaccgactgcgccgccaattaatgaagcataaaaaggtttttttagtctaagcgtgacgccataaatggctggttctgtgataccgaagaaactaggaagcaatgttgaaagtgctaaagaccttgtttctacccgcttggtgcggatgatgacacctaacacagctcccgcttgtgccatattcgcaatgaaattcatcggaagcagcatgatatcgtaacccactttttcaaagctggctaacgtgcttgggaagaatgcgtaatgcatcccagttaacacaatgagtggcatcaagccgcccattaataaaccggcaatcggaccagcgaaattgaacaaagaagtgaaaaagatttctaaatactgcccggaaacgtttccaataggagctataaaagccagtgtaagaggtgccgtgatcatcaggctcagtaccggtgtaaatacgatacttaaggattttgggatcgcttttgttatccacttatcgacaaagcttagtaatagcacacctaaaataattggtaatacagaagatgtataattatttaatggaatacttaaccctaaaaagcttaacgggtctgctccttttgctgcaccttcgatcatcgctggatatagtaaaattcctgctaatgcgagcgcgagagattctcttgttttaaacttcttcgctgccgaataagcaatgaggaaaggtaaaaagtaaaagacagcatttgaaaagatttgaagtacttgataggtagagcttgtttccgtcagccagccaaagctaacaaacaatgccatgatccctttgatcaacccactaccaacaatcgctggcaaaataggtgtgaaaatcccgctgatcacatcgaatacgacttcgatcggattcatctttgacgtatttttaactggagcagattcattgctgctatgaccgaccagatgatcaatcttctcatagacctctgctacctttgctccaataatgacttggaattgtccactttggaattgtgcacctaaaacaccatataatgttttcagctcatctacttttacttggctttcatcgttgagattaaatcttagtctcgtgatacaatgccaactttgagatatattttcggttccgccgattaaattcacaatttcttgagccaattctttattttccatgccttcaccccttcattttcacaaaaaaaacctaaacaaaatccaccattagaaaagatcattcttcttcatggagatttgtttaggttaatgctttttcataacacgcctaaaagaaatcatttatttttttggtgttcctttgtgattctctcaatatggatgactaaaaaaacaagttcgtcttctgtcacattccaattgaattctcgttttaacatttctttgataatcaatccgcaggcataactcttcatataacgatcctgaattaattcttttaacgagtcatccatctgctgcggcggttgattggtttcctgcctcacaataaaatatctcaagtgtgtgataaacctcgaataattaatggatgatttatccaatatcatctcgaaaatattttgaataattttgacgatttccttcgtgaggtgagtcatcttaatggtgtctcccatagactgaccatctatttgagcgtttacaaaatgcagggcaatgagtgaagcttcagtatcttcaaaagaaatgcccatcattttttgaataattgtcagtgcttttttcccgatttgatattcttgaaaatagagatgtggaatttcccacacaatggggttttcatacgccattttttcttcgtgcctttgaatagcaaaggtgagatgatcggatagcgaaaagagcacgctggaacctaacttcttattcaacatctcttcgcctacgcgaatgattttttcagttaataaaaggatatcagttgggatagcggcaagttgagattctaatggagacgtctgatcagaataaaatgtcttactgacagcgctctcatcaagagtatcacctttcttctttttaaaacctattcctgttccaaaaacaacgacttcattttgagcctctgttagagctaatacaatattattatttaaaactttaacgacggtgaacatcctcatcccaccttacctaaaatgctaaaaaaagcataaaaaaacaccaaaatctcagcaaacaacgtacaaatgtacaaactgtttacctgacttggtggtgcctgattatatcagtaacactcctgcatcggttacgactttattttaaacagaggaatgaccaaagtcaactattttttattaaaaaatagattgaaatacctataatcattttaaatttcattgatcattttacggtttaacatttttaaggttgctgtaaggttcggattaatacaagttaaggttgaggttgtacaatgggtttgtaaggaattgagggatgagtcaaatggtcccctcttctaaatcaatcatagaggtgaaaaggtttgagagaaaataaaattttgtcttcattatgttacttcagtatcttttttgcaccgtttctgtttccgattatcgtctatttcttaggaaaggacgaagtgaaagagcatgcgaaaaaatcactatggacacatattattccttatttgattttcggaattggtattgccggttcaggtttacttggcatgaacgatatcagtcatgctggtccgttcttaattgcaacgtatgctgtgacattccttgtcgcgatctacttcttcatttggaacattgtgaaaggcattaaagtgttttcagaataatagatgaaaaaaacggttctgtgattgagcagaaccgttttttgtatgtccgttcaagcgggtaattggatatcaatcgttgttccttcccctattatactgcgtatcgtaatatccccgccgtgcttttggataatatcctttgcaatggccattccgagaccagagcctgcatgtgtccctcctgtattcgtccctctatagtagcggtcaaacactttttctagctctgcctcttcgattcctttgccgttatctttaatcgtgatgtgggtattttctttttgttccagctgtacaatgattttcacatcagaatcattgtgaacaagggcatttaaaatgagattggtgaccgctcttcgtatgaggatcgtatcaatatttagcatgagcttgtctacattcgattgcagctcaatcgtctgatctgcatatctcgaatcgtttaggatatcaattaacgtttcccgcagcaacggcacaatgttcactagctctttatgcagcatcacgtcgttatttttcagccttgttgttaaatttagatcctccatgacatctttgatgtacagtgatttattctctatgatgctggcataatctctgatgtcttgatctgaaagaggataatttggatctttgatgatttctgcatagccttgaatagaggataatggtgttttaatatcatgagaaatatggctgatccactcttctcgcatttgctctaatttgtctttttccttttgacttgaagcgagctgctctgataagtgattgacattatagaatacatctttatagattcccttagttggcagctttgtcgtataatctccgtttgcgagccgctggattccatgaatggcacggccgagcggtttgatgagctgccggctgaataagtatccaatgaataaggcaatgatggcatcgatcgataataaaatcatcgtcccgatattgaatcttgatattaagtccttcgtgtcgaaagagaataaatattttccgatggcagggttcttaaatccgataaagtagctgtattccctgccctttcctttttttccgccggcataaatggtcgataacaattgcttatctttatatttatgtatgttcacgatttctataggtgtatatttgctctttattcctttaggtgcgtgtgcatgatagacgtcttgtccattttcgtctaatatttgaatccacgcattttgttgttttaaggcttgctgtccttctttgttcacagtgatgccttgatcggaaaaggttatgtattgttcaaatgttcttgtgaaggtttcgggcgtattttcttcgttttgctggctgcttgcttgtagtacaagccaaatcatgaatccaaataagttaataaagacagtgataatggtcacgataatgacagagaccatatatctgcctgttaatcgccatttcatccttacgcatcctttacaacaaatttatagccaagccctttgaccgtcacgagaaattctggtgtagatggggaattctctattttctcccgaagtcttcgtatatgaaccatcaccgtattgtcagaaccgaagaaatcttctccccaaacggtttgataaagcgtttctttactgatcactcgattcggatgctgcaagaaataggtcatcagcataagttctttcggtgtaagctcaattaccgctccgtttttcgtcagttcggcttgctgctcatttaactcaaatggcccttttttgatcacgggatcagcttgagaaggctgtaagtatgatgaccgtctcagctgggcttttacccggtaggcgacttcctttgggctgaaaggttttgtaatgtaatcatcgccgccaatggcaagtcctacaattttgtctgattcctctccctttgctgataaaaagataatcggaacatgcgagacgtctctgatttgtttacaaatatcgtagccttcaccgtctggcagcataatatccagtatgacgagatcgggatgttcttgatggaattgcgtgagcccatcacgggcagttgaagctgttatcacccggtcaatgccttctcttgttaatactgtatggattaattccaaaatttctttttcgtcatctataatcaatactttgctttgaagctttggcattatgatcactctcctgaagtcattgttattattatacccaaagtgtagacatcgtgaaaaatcaactttctatttgcacagaaaaaagccaattttcttttttaatgagaaaattggcttttggtgtttttttagcgtttgaccacaaatgttgtcacactttgagccgggagatgagcccaaaattgatttcctgatatatttaagtcagttccaggctgaaggttgctgttactactcgtaatccatcttgacgcttgtgaagcggttccattttgcatgacaaagtgctggttaacgcctgtattgtttttattaatcgctacaatgacgaccttattgtcccctttataggctgagacgaaaacattcggttcagggcttttcgttgcatcaatcctgacgtaccctggacgcacaaacttggagaaatgcgccatgttgtagccacgtttgctaatcattccatcttccttcataggaccgtatgatctgcggatgtaccaccaaacatacgcctgaaaatcaccttccaccatcgaatggtgaatatgctctgacacccctaatgcctcaggccagcggtccgctgaattgttatcactattcgggtaatatacctctgtcatccacagctctttccccgctcctttttgtttaaaaagaggatacggaagctggctgatctgggttccatacagatgggcaccgagaatgtccatatttctaagcgcctgcggatcgtttaagataggatctgatatatttttaaggtattgaaaagattctggtgcaatcacgcgtgcattaatggaaccggcattttctctcatgaatcgcaggatttcctgaggcgtccaccatgtccattcgtgtgcataatcaggctcgttttgtacagaaatggcatagaggttgacaccattatttttcatgtatgtcacaaaatcattcagatgctgagcatacgcggcgtattgattgtatctcaaccgctttgcagacgcaccattacggttgaaagtctccaccatatggcttggaggattccaaggcgaagcgatcactaaagcgccatgctctattgctcttttggcggtagcaacttctctgtgccaattatttctgttctcgtctacattaattcgtaaaatggagaaccctaattgattctgcccattgccaaaggcggtttccctttgaggggcggttaaatcaccaatccaagccgggtggttcattccgccaaagccgcgaatcacttgtctttccgcattgacattaatattcgcatcacttgctgctgaaacctcagttaccccaggccctatgaacatgacagacagcatagtgaagcagatcaataaagtacaaattggttttttgattatggacatcaaattttcccactctcccatcaaccagtgatcgatgccgcagcatctgattttgtttacctttgagtaaactgccaggaatcaaattggaataggttggcaccatttcctttgaagacaaaaaatacgttgtgcactcctgctgctccgttcactgccgtttctatttctcgccagtttccgcctgtggaagggacattgagtgttccggcaattctgccgtctggactgccaagacgtacttctatttgtccgcctgaagcggatgctacattggctttaaaggttctggcaccgctcgatccgaaatcgacattactgacagccacccaatcaccgttttgaatgtttgtgacatgctggttattgactggtccacctggtgctgaggaagcctctgttaaaatgcgtccattccaagcgaatgtttcagcttctacccgttgataaggattcaggttggaaagctgtttaactccttcaaaattggctgcgacctctcgaagggagccgtcagcattatgcacaagcttattaatgtgtggagatctgtagcctttccctgctccatataaggctgagctcaccgtttgcgtgtgatacacgacataccactcgtttttaaaatggaacacagcatgatggttgttaccgccgccgccgaaaaatgcacccggatttttcaggaagtgtcctttatacgtaaaggggcccattggacttgagctcgtcatataaccgatctcaccaggtggtttatctgctgggtgggagccgccaaaattgatgcaataggaatagtaataggtaccgttatacttatgcatacccgaatcttcaaacataaaaggagcatcaatggttgatgcgctgccaactacactagtcatgtcagatcctagtttcagaactcttgctgttttaggattggcccattgtccctgcgttggatttgaaccgcctggaacgcctcctccggcatatagataaccggttccgtcatcatctacaaatacggctggatcaaaaagccatacaacaccggacatccctggtgtatttggcgtgacgagcgcttttccgataggatctttccaaggtccaatcgggctgtctgctgtcaagacgccaatccctccgccgctgttagcaaaataaaggaaaaatttatccttcccattgatctttttcaccgcagcggatggagcccaggaagcgcctgcccatttggcaatccctctcccgccattggccccatttgcgccagctactggaatcgctccgtgatctgtccagttcaccatatccgccgaagagatgacaaagaccctattcaaattcgcaaaagaattatccttaatcgttccattgctgtgatattcatagtcatcactcgacatataaatgtacactctgccgttataggtgagcgcaaacggatccgcccccaggtgatggtctatgagtggatttgcatttcctactcgttttgcaatgggggtacttgctgcactcgcatcatataccggtatacagctcagcaccaaagcaagaatcaaaaaacctacaccgcacttcatcctcttcctcatcgtgtcattttcctcctgttttcatcttcctaatattggggtttacgcccaatttcaaattatgttgatatgcgctgatgaagaatgaatacaaaggatgatttctaggggaaatcactgctgaaatcatcatgaaaacccttactttttgactaggagacaataaaaaatgcagtcctccactttggaactgcattttttcttcttattcaatgaatgtagattacatataacgagcggtcaccattttctttcttgtgtaaaactctactccgtctgttccgttcgcatgtaagtccccgtagaaagaatccttccagccggaaaacgggaaaaatgccattggtgcgggcacaccgatattcacgccgagcatacctgcttcgatgttttcgcgaaattctctgatgcttgatgcgctgtccgtgtaaaggcaggcaccgttcgcaaattttgattgattggacaggtcgatcgcttctgttagtgaagagacacggacaattgataagactggggcgaaaatctcgtcctgccaaattttcatttgatttgtgacatggtcaaaaatcgtcggtccaacgaaatacccttttccatttgtttcaaggtcattcctaccatcacgaatgaggcttgctccttcttcaatccctgactggatatattgaagcgttcgttctttatgttcctttcgaatgactggaccaagaaagacatcttcatttattccatttccaatgacgagctcgttcgattcatcaactaatttttgaatgaactcatctgccacttcttcttccaccgcgacaacggccgcggccatgcagcgctctcccgctgatccaaaggcagcaccaatgatttgtttcgttgccgcatctaaatctgcatctttgaggacaatggagtgattctttgcacctgcaagtgcttggacacgtttgccatgctctgtgccttttttatagacgtattctgcgactggctgagagccgacaaatgaaatggctttgaccttttgatgttcaagcagaccgttgacgacatcgtgagccccattgacgatgttgagaacaccttttggaagacccgcttcttcaaatagctcggctaaccgcgcggcaagaatgggcgttcgttctgaaggttttaaaacaaacgtatttccgcaggcaatggcaagcgggaacatccagcacgggaccatcatcggaaagttaaatggcgtaatgccgccaatgacaccaatcggatagcggtacatgccagattcgagtccagatgcgatatctggtaattgttttcccatcattaaggtcggtgcaccagcggcaaattccacacattcaatccctcgctgcacttctccttttgcctctgttatgctttttccgttttcaatcgttacgagttcagccagctcatcccatttttcaacgagtaactgctggtatttaaataaaatgcgtgcacggcggggaactggtgttttcgaccaagtggtaaatgcttcttgtgctgcctgtaccgcacgttcgacatccttttttgttgaaagcggcacttctgcgatgatctcgccagtagctgggttatatactgcctctgtttgacttgtttctgcctcaatccattgtccgccaatataatttttcaacatttgtacatctgttttggtcatgttccctctctcctttttatgaaagaatgtcatacttataggatgtgtatggttgtcattgtctcatctaacgggcgcccatctgtatacactctttgtcaaatgaaactgacgttttggtttacgttgtgataaagagcttgctctaaagtgtgaaaggttgccgcccatcgatttgtttgtgagaaatgattccggaatgtgatttattcatggtgtatttttgatcaactattgggtaactgtagaaaaatcataatattaaaaacgctttcagtcaatcctctttttgtaacataagaaaaacctgatgcgcgttgcatcaggtagaggctggttcttttcttttatttagttgatgcagcatattgattcggttctgcaaaatgcgggagcatctcaccatgtgcttcaatgagttcatcgcataatttgatgatgtcatcaatggatagttcagcgcttgtgtgtggatcaagtaatgccgcttgataaatgtgctcttttttgccgctaattgctgcttcgattgtcatgagctgtgagctgatattggtccggttgagtccagccaattgttcagggatctctccgacatagcaaggcatgatgccgctgcgatctgcaacacatggtacttcgacacacgctttttcaggcagattgtgaatgagtcctcctgtgttcagcacattcccgccaaatttaaagggaacgttcgtttcgatcgcttcaatgatacgagaaccatattcttttgagcgagtatgtgtgatctgtgtattgcccacaaggtcatgcttcattgtattccagttgctgatttgttcctcgcagcgtctcgggtattcatcgagcggaatgttaaattgaccaatcagttctggatagcgtgatttgataaaataaggatggtattcggcattgtgctctgaggattctgtgacatagtagccgaatttatccatcagctcaaaacgtaccatatcatgatgccgcgcttgctgcttttctttcgctcttcttttgatgtctgggtacaaatcttttccgtcccgtttcacctctaataaccatgccatatggttgatgccggcaattttttcttcaatgccttcatgatccatttcaagtgattcaaatagatcctttgtacacacctgcacactatgacaaagacccaccgtttgaatcggtgtatagcgcagcatcgcacctgtcagtgtggccattggatttgtgtaatttaataataaagcatttggacaaacctcttccatctcctttgcaaaatccagcatcacaggaattgttcgaaggaagcggaagatgccgccgatgccaaccgtatccgcaatcgtttgtcttaatccgtattttttcggaatctcaaaatcaattacagtgcttggccgatagcctccaacctggatggcattgatgacatatttcgcatcctttaaggcttcttttaggttgtgatagggcttaatggtcacatttgcaccgtagttctcttttaaatgccgaagcatcgtgtctgattcattcagccggttatggtcgatatcatataatgcgaattcaaagccgctaagtgcagggacgaacaaacaatctcctaatatatttttagcaaacacggtactccctgcaccgataaatgtaattttagacattgacgactctcctttttacatccatattgaactaccctttgacagagccttgtgaaagccctgcgataaaatatttttgcaacagtaaaaacatcgtaaccattggcagcatcgcaatgagcgcagcggcaccaacgagctggagctgatgctgattttgaccaaaaaaatgggataaggcgactgtgagtgtatgcatctctttatcttgcaaaaagaagatggcaaattgatagtcgttccaaatatacacacaggcaatgattaagacagaagcggtaatgggcttcagaagaggaaaaacgacagtgaaaaaaactctgagtgtccccgctccatcaatacgggctgcttcttcaagctcctttggaatggtcgaccggataaagcctgcgtataagaaaatggttagcggcaaaaaagcagcgacattatttaaaatagcgatttgataggtgttcatcatcccgatttgaacgaccattttatagagcgggacaagggctgtgagcggtggtatgaccataatggtgatgaataaaacataaactgctttatttagctttgtgtttcttcttgcgagcggataggctgcaagagatccaagtatgatgagtaatacagcggagctaaacgtaatcatcactgtattcaaaaaggactggccaagctgagcctctgtccatgccgtgcgaaagttttcaagatggagcgctttcggaaacagccattttgaactgaaatctcctatcccctttaatgatgtcgtcaccaagatataaaatggaatgaggtgaagcaatgtcaccaaaagtgcgaggaaggtgtaccatctctttttgcgtttaaaggcgttatccatcacacctcggtctcctttcgtttgaaataaattagtgctgcgacactaatgacaaggatgatgaccgccatgaagactccttgcgttgctgcatagcctgcatcctgacgtttgaaatacagatcatacataaaggtcgacatcgattgcgaggaatctccaggtccgccgcctgttagtgccacaatgacatcaaaaagtttcagcccgccaatgacgttaagcacaacattaatggtgatagacggcataagcagcggcaatgtgatccgtctgaattgctggaggcttgatgcgccgtctaattgtgccgcctcataataatccttaggaatactttgaaggcctgctaaataaatgatcatcgcaattccgacgaattgataggtgttaacaagcacaatgatccatgtgtttaattgcggagtgccaagcgcattcatttggtcaaatccaaaaaacgtcaccacatcgtttaaggcaccgccttggtaagcaaacacaaaataccaaatatagcccatggcaatcggactgatcatgacaggtagatagatcaccgtccttgtgatgcctctcatctttaaactttggtttaataagagagcatatccaagtccaatgatattttgtaagattgtactcccaattccgtagagaagcgtgtttttgacaacaagccatgtcgttgggtcttgaagcagacgtttatattgatcaagcccaatccattcataagtttgtgagaacccgttccaattcgtaaaagatagctgaatgccgttcaaaaaaggataaatgataaaggtactgacgacgagtacagctggcatgtacatccaccaaagtgatgaattccggcttttttgcatcttttgttttggtaaagaggtaaatgcggctggctgctttgcttttgtgatgtcattcattggcttcactcctgtttcagcatgggcctgctattgttttttcagacgcttatattcctcttccatcttcttcgataattgttctggtgtgatggagcctgctaataattcttgacccgtcgttgccatgacagcccacattccgcttggtaagtattttcgatcgaagtaaggttcaatcttcacctgttcgtattgatcgtaaaacgtagagtaatagtttttcgcttttacatgcgttaaggctgcttcagaggatgtgccttctgcgattttttccgcattttcaggctttgcgagaaaatcgatgaattgttttgcttcttttagatgcttggagtccttccaggcagcgacagtaaatcgttctcccccaatccagctttgctcatctccttcatgaatggcaggaacaggtatcgtgcctactttgatcgattgattgagttctgacgcttcaggtcctaaagaacctccgacaaaggtgaaggctattttgttttgtgccatcagttcaggtgcttgagatagtttcgctgtcaggacatctttgtttaaaagatcttgatccttcagctccttcatgaactgtgcaagcggtgtatagtgagaccaatcaaaagatccgttttcaagttcttttccgtattgatgttttggatcggtgattaataaaggtgtggctagttcatcaaagacttgggcgatatttgagttatctcctcctggtatccagagcggcacaacatctcctttgctcttttctttaactgtcagcaaagcagattttaattcatcaagtgttttagggacttcaatgtcatagtcctttaatagattggcattaaagctaagcccgtcttttgcttgattcagcggatacgcgtatactttgccatcttggtcctttaaaatctgatcgagtgatggatcaagctgtttgacccaatccatctcttttaaatcagccacatactctctgtagcgcagtttggcccagccatgtgtgtcaaacagatccggcatatcgtttgcccccattttgacgcggatcatatcttcatagctgttgcctgggaagttggcatcgattcgaatatgtggatgctctttttcaaactcacgaatcacttcttcaaatgcttttctttccccgctgttgctcatcgtcgaaaagagagtcagggtgacctttccgtttgcttcggacgtaccgttattgccgcaagcagacaaaagaatggtcaagacaaaggccgcagtcagcagcatgaattttttattcatggtttcctccttttgatcactgaaaattcagacgataatcggtagaattcatgcagttgcggaaacaaaagaagtccattatactggaattctattcttttcaaagagataagagagcataacggcaggctgccttgttcttagcatgatctggccatcatgctgagcagctgctttctgcttttttgtctcttttttgtttgctgagatcttggttcaccccctttcatggatgagacatgtgctgccccgttcgatgagttttgttggcacgacgacttttagagggagctttcttccgtttattcgctcaagcaaaagcttcaagccgacttctcccatttcttctgtatatacttttacgcttgtaagcggcggacttgaaaatgaagcagcttcaatgtcattaaacccaacaatggatacatcgaaaggaacacgcagaccggcttcgttgagcgcacgcattgcaccgatcgccattgaatcacttccgataaaaaaggcttgtggaaggtttccttttttaatggcttgctgcataagcgtatagccttcttgcatggagtattccccaatgtggatgtcatccagatgaagacatcccgcctcctgcattcttcccataaacgtcgtttgcctttcgtcctcaatcacagcgtttccttcgaaataatgctcccgctcctttccgccaatatagcctagatgtgtatagccaagcgattgcagatggcgaattgctcgatctgccgctcttacaaaatcaacatgtacacaatcatacaaatcttcatccgcataatgattaataaaaacaatgtgttccattcggtttgtcattttttcaactgtatcgggactgattcgtccaatgacaatcaaaccgtcaatatcctttagcatcgcccctttgtccatgcttctcaggcgaaaggtatggagggtggacagcccttgtttggcatattctttttcaattccttttcgaatcgatgaaaaaaagggatcatttaattcttcgtcaatggattgagcgacaacgataccgatgactggggattcagatggaggtttttcttctgcttgatcggcttttcttgctctcactggggtatagtttagcttctttgcaatgtcgaggatgttttgtcttgttgcgtgtgaaacggcaagtgtttgatcgccatttaacacacgggatacagtggatacggacacttttgcatcatgggcaatatctttgagtgtggtcataggcaaactcctcttagattttgactaaatatttactaaagatatttgaaggataacatataagtaaagcgctttcaattgtggatttgtaattttttattttgtatttggttatgttttggtgagattgcggtgttttagtaaaattgcgtaaaaaagaggatggattacatcctcttttactaacgtaattcaattgaggctgattcttttgcaaacaattgcttcattgtctcccaagctttatcgagttgattgtgaagtccaaataaacctgagttgccgatgatatagatctcatttccagcctcagcaagcagccggaacgtgctctcattacaagagccgtctacttcaattgaaaacgtgtatcctctcttctcttttatctctttcacctgtttaattttctgaagcatttctttaataaaaggctgacctgcaaagcctggatcgatcgtcatgatcgtcactcggtctattaaatgtataaaggaatttaacaccgcaattggtgtggcgggatttaagacaaagccgaccttgcagtctctttgatggatatgccgaatgattctaaaaacgtctctttgcacgacctctgggtgtaagcagatcatgcttgcgcctgcatcaatgcaggcatcgattaaaaattcttgggggtattccgccataaggtgaacatcaattggtctatctgtcagttttcgaagctgttctatgaaaaagggcgataaggtgatatttttcacgtaatgaccatccatgacgtcgacatgatatcgatctgctcttgtgttgagtatatgaatttgttcgcggaagtgcgttaaatccatgcacattagtgaaggtgaaaaaatggctgtcattcttaggctcctcctttttagagttgaaataaaagcttgatcaatccaatcaagattccgatgataccaaagtctgtatctccaaaagttgtcccttcaaagccaagggttcctaacacaggtaataaacaagcaggtaaaaaggaaagaagcaatccattcacaaaggccccagcgacagcccctctcacgcctcctgttgcattgccatacactcctgctgtagcgccgcaaaaaaagtgcgggacaagaccagggacaatgacagttaaaccaaacaaaggtaaaagaaaaatggatacgatgcctcctgcaaagctgcataaaaaaccgataatgactgcatttggagcaaatggaaaaacggttggcgcgtcaagtgccggctttgcccctttcacaaaacgatcggcaatccctttaaaagcaggcacgatttcaccgattgccatcctcaccccggctaaaataatgtatacaccagcggcaaaggtaatagcctgaatgagaatgaagacagcgaagttcgtgcccccgctaatttgttctataaagggaatccctgcaaacggtgcaatcgcaaagaacagcaaagccatcgtgatcgaaatggcaacagatgtatctcttagaaagccgagtgatttaggcacttgaatggtttccgttgatttctctggacgaccgatccatttgccgatcattcccgctgtaaaataaccgaaggtactgaagtgtccgagcgcgagatcatcgcttcctgtgactttccttgtgaatggctgaaggatagccggtgcaatgaccatagctgttcctaatataatcgaaccggtggtcacaagaaatcctccttgcattccggctgtcgagagaacgactgcgagcattgcagccatatacaaggtatggtgccctgttaaaaagacgtatttaaagggcgtgaattttgccaataacaaattgaccagcatgccaaaaatcataatgagagccgtctgtgtaccgaattccttttgggcaatggccgccatggcatctgtatttgggacaaccccttgaatgtgaaaggctgcttcaaacatttttcgaaaaactccaagtgaatcagacacgaccgtggcgcccgctcctaatattaaaaaacccatggttgttttcaaggtgcctgacacggtatctgcggctgattttttctgcaaaagtaaaccggccagtgcaaacaaaccgatgagaattgccggtgtgcccaatatatcgttcatgatcagttctatcatgatgtgaatcccccttttttgtggcttatatgtgtttatgaaggacgtctttaatggcttcctggtctaacaagttatttaatccagcgacctttcttgtgccgtcatccagctggtcgataatgtctgttgctccgatatatagatcggcctgttcatttttacttgtgctgagatcggtatgatccacttcagctaccagtcctaactcttctaatgcttttttgacattcatttctacgataaagctgcttcctaatccgtttccgcacacaacaagaatttttttcattctctttttcctcctttatagttgtgaaaattgatcaactagtttttgcaccgatgctaattcctttgcttcaaccagttgttttctccgtttttcatcacttaacagcatggtcagctgtttgagtgctttcaagtgggtcatactgtcaatggctgctagcacaatgatgagacgaacctgtttttttccatctttagagaaaaaaacgggcggttcaaatgacatgagtgacatgcttaatttgttcacgccgtcctctggtctggcgtgcggaatggctacttgtggtgcaatcacaatataaggtccattttgatgcacagactgaatcatggcctccacataacctctctgaatggcattttgatcgagtaaaggctgcgctgcttttgtgatggcctcttgccaagtatctgctgtttgctggagatgaatggttttttctgttaataaatcgtttaacactggtttccaccctttctgatgggatacatatgcgggatgaagtagctctttaagatcacgaagcagtgctttttcattttgtatgatggtatgctgctgaatgatgttgaataaagcgtccacattgttctcatcaagcctgatttctgcaccttccccatattgaagtaaggtttttttctcataggcagtgagaatgggatgaacgaggtgaacaggttttcctttaaacgaaataggtgttgttgacacaacaaagtcgacatcaatggatgacatttcttcatatgaacgctttgataatagttcacgtacttcgatataaccgattaattcgataagctgtgttttcagcatgtgacttgtgccaattccttcgccgcagacaatgtatacagaacgccgcacaattggtgaaatcccttctcttctcatccaaccaccaaaatgcatcgccacatatgcaatttcatggtcgctgatctttgaacaggtcgccttttctaaatggcatacgaccttttgagtgatttcaaacacctctggctgtgcttttttaatagattctgttaattcattgttgatatcaatgtgatagacgagtctgtaataggccgggatgagatgcattgtcaagttttgctccaaggcttcgtactcttgaaaggaaatacatgcataccgctgaaagtcaaaaatcatttgtctggcaatggtgcgaatgagatgctcttctggttttttacttgatggaagcttttgtttcttggcgctgagccatagagtagtaagaaaatagatttcatcatcatgaacatgaaggccggtttctctttgaattcgtgccatgaaacgaatagccgcaaagcattcatctgtttcctgcaatgtacgcttctcttcgtttgaaaggtgtacagcacgttctagcttcatccgcttaaagtagaaaaagagatccaaagacagctgatccagcatgtcatctgcaaactcgaacttaagctcttgttctgactgctcgaggagatgctttaaccgtttatatgaaattggcccctttaaccaaaaaggtggaaacgctttttcgttttttatcattgtgcgaatggaatgaatataaggtttcagcgccaatcgaatcgctctttcttctcctgaaatcaaatagccgcaggctgcctgatagtggaggataagctgctgctttgaaagtgcttcttttagctgtttcatatcttcaagcaatgtattccggctcactttggtcatcttcataaaatcatcaattcttaggcgtttctcactgcatgcaatggataagagcaggatggctcttctttcctttacacatggttcataatcatggccaacgagaatggtgttcgctttttgaataatgacttctttttcatgtgggtgtaagtagtagccaagttgatcttttcgctgaataccactcagctgctgagtttccagccagctattcatgcgtttgatttcagagtagacggttcgagtagagacattcagtcgattctgtaaatcttcaattgataaataagatgtcgtgtgaatcagcattgatagtaaagtcgtaccccttttggttaaatacagttggaattcctcccttcttccctttggttataagtctaatcaactcacatgcgtcaaagaagcccaaatgtcttcagcacatgctgtgcagcttttgggtgctcttttgccataagaaaaagcacacccgcttgagtgtgctttgagatttgtacaaaaagaaccctttgtcttcttttatgtgatagaaaacgtttgtaatgaggtcatggatgtactgaaaaatctttttgaatttttttgatccttcacaatgcttttggcattcttgattcacacatatgtactgcatcagtgtccgcatgttctttcttctggacaaaatattcacgttcgttttgcttgcctctatcatacgatgatccacttagaaaaaaaggtcccctttttctcggccaatacaaataagaaaaagtgcccataaacatggacactttttttatattattcccaaaaagcatcgccttcgtaataaatatattcctcaacaaaagttttaaagtctacataaacgtcttcaaacagataaagctgtcttcttctatatcctgttgttttattgtaacgtatcccacaaaaacactatgctttaataataccgttttcttttagaaaccgttcgaacaattcatcccctttatcctcaatatattcatcatcaatattatactctccaaccaacaaaccaaaatcatcatatttttcatatttttgtttaagttttataccatagctttcttgatcaaaaaacaataaccatttccctgaatctaaacttttaaaaaacacaccttcataatctgaatcattttcataatagcctacatgcaaatgcattgtatcgtctaagttaagcaacgttgatctctcctttagaaaataacatgatgatcttttagattaggtggaacgtgataatgcagaacagcaggtcttccatgttttataggtgcataatctagtctgaatagtggttttttggtttttttgctacgtacctgtataatgcgccctcctgatccagggccatcaataatataattttgaggcgcctttaatgctttctgcacatatggtctagctactttccatcctttttgcattcccttttttccaacttgagaaattaataatcttaaagcagcagccaccaccggtatccactgaccagttacactgtcttctttcaattcagcattctgactctgtaacgctaaagtttcttctaattcaataaatactggatcattcaaaagaaagtcaaattctttattaaagtttgatacatctacatttgaaacatctataccggtatcctcgtatacttgttcaatcaattgatcactaaccacaagttcactatcctgtgaagttacgctctcagcatatactggagtcaccgccgaaaaacatagaataaaagacagtactactagaataagcttattcttcatataaaccctactttctcaaaaaaatttatctgtattcataactgaatacccgtttattttatctaaatttttgatttttttccatatttttttcgagattgtgtgtttattataagaagaatattcttcaaaaaagagagcagcaagacctgccatgtaggcagctgccattgaagtaccactactatataaaaaagaaccatcttttgaataactttttatatactgccccggaagtaacacatttaatcctttacctacagttgtccctttccatatatcaccgttcatatttaaagctcctacagcaataacatcttcaaatttagcagggtagagtatttcgctcttttcttgtaacccatagttcccaaccgatgaaattacaacaatattattttttaaagctctatttattacagattccagttttctagaatattttaaagtgccaaatgacattaaaataatgtcaaccttttcttcaatactataattcactgcttctattacattattaatatcaccatttaaattgttatccaaggctttaattacatataaatcgatgtttggcgcaacaccaatgtctttactagttaatattccagctaaatgagttccatgaccatgattatcttgatatgatcttttgggatctaaaacgtttacccctttcttaacattgacctcctgctttaatgaaacacctgaatcaattaatgctactttaacaccttttccagttagttttttctggttatgcagtttattaatttttaaatattcataggcccaattttcattcttaaatttctcagttttgtttttatttattattaatgttatagataccacagttagaattaatgctactagaaggagtgtaagtttcttcttcaaaatcatcgcacctcttttaaacatattatgagaaacatgatgtattttaccattaatttttttcaaatacaaaacagcactcagatgattccaagtgctgtcgaaaggttaccaaaaatcctataaatcgcaacaaataaggtatattataacaatactcatgttattttatatccttaatcatattgtatccttataggtactccgttttttgaatgaatactagtctttccgtaatcaggaatgtctgataaataggctttgtggttaactccgtctaagattaggagctttactcttcccaactctatgtgctttcaattttctttgtagttagaatttcaaaaagagatgttcgtcccttaaatctaaagacaaataatcaaagccttcagatcagcttcagtcagagcctcatctatgttttcagcccaagatagttatctttgacagctcagtcctcctcttatcatcagttatactttcagctaaaccatcttcaaaaacagcgtgcagcctttgagtccatttttccataaaaaagcacacccgcatcagtgcgctttcttacgacttagacttaagcaattgcagctcttggtccataatatctgctgcttcggtaataaattgaatgattaagtctaattcttctcgtttgtattcgtttgtgagctgttttgttgatgccgataaggatcggaaaagttcttttacctgtgatttccctgccgttaatggaacgatgataactcttcgtttgtcttttgggtccttttctcttttggcgtagcccgctttttcaaggcggtcaatcagagctgtgaccgcacctgagctaagacctgttttttcacttaattctcctgctgtgagaggaccgagttcgtttaataaatcggctgatttgagatctgttgggaaaaggccgagcgattgcgcggccgcttgatggaataaaaccgttcgtgtggcgaggcgcctcattgtatgtatgatcaggtctgctctgtcttcagtctcgttctttattgacaacttgttctcctccctttaaaatcaatttatcttgatcatcaagataaatgttctcttacttatggttaagttgatcatagcaaaaataaggagagaacgtaagcaggaggtaaatgaaatgaatcatgtggataaaggcaaggcatccactcgctttgttgtcatcggtttgctgttagggatttttatggcagcgatggacaatactattgttgcaacagcgatgggaagcatcgtagcagatttgggcagttttgataaatttgcttgggtgacggcttcttatatggtggcagtgatggctggaatgccgatttacggaaagctttctgatatgtatggtcgaaagcgtttttttctgtttggacttattttctttttaattggatcagcgctgtgcggtatcgcacaaacgatggatcagctcattatttaccgggccattcaagggcttggaggcggagcccttcttccgatcgcgtttacgatcatctttgatatcttcccgcctgaaaagcgcggaaaaatgtccggtatgtttggtgcagtatttggtttatcgagtgtactaggaccactgttaggagctattatcacagattcgatcggctggcattgggttttctatattaacgtgccaatcggtattgttagtgtgttcttgatcgccagatactatcatgaatcgctggaacatcgcaagcaaaaaattgactggtcaggtgctattacacttgtcgtggcagttgtgagcttaatgttcgcacttgagcttggcggtaaatcttatgcgtgggattcggtgcaaatcctcacactttttgccgtgtttcttgtgtttggtaccatcttctttattgttgagcgtaaagcggaggaaccgattatttctttttggatgtttaaaaatcgtttatttgcgacatctcaaatattggcgtttttatatggggggacatttattattcttgccgtctttattcctattttcgtgcaagcggtgtatggtgaatctgcgacaagtgcagggtttattttaacaccgatgatgataggatctgtgattggcagtatgattggcggaacgatgcagacgaaagtgcctttcagacgtcttatgacgatctctgttatttcattttttgctgggatgctgcttcttgccaatatgtcaccagatacagctagactgtggcttacactctttatgatgatatcaggctttggcgtcggctttagcttctcccttctgccttcagcttcaatgaatgatcttgcccctcgttaccgaggcagtgcaaactcaaccaattcatttatgagatcacttgggatgacgcttggtgtcacgatttttgggacgattcaaaccaatgtcctaacgaatcgcttagcagatgcctttagcggaataaaaggagccccttctcaaataggcgatccacaagccatttttcaagaaggtgctcgctcacaaattccgcctgatattttaaataaagtcatcgatgcgatgtcacaaagtattacgtacgtgtttttgattgcgttgtttcctattgcccttgcagcgattacggtcctatttatgggaaatgcacgagtacgcacatcaaatgaaatgaaagaaaacgaataatgtgaaaaagcagagcttaagcggctctgcttttttgtttcactgatatagaggatgggctttgccctcactgccaacgatccgtattttcgatgtgaccatgtcttttgctgcttgttttgctttttgtaaatacatacgtggatctaagctttcaggttcgtttgagaaatgatcacggatggcttcagagtacgcatttttcaattcagtagagacattgacctttgccataccaagtgctacacatcgtctgacgtcctcatccggtacagcggaaccaccgtgcagcacaaggggaacatcgaccagcgctgcaatttgttcaatgcggtcaaagtcaatatccggtacccctttataaatgccgtgagcggtaccaatcgcaggcgctaaagtaggtaccccagtttcttctacaaattgacggcattctgatggaatggctttttcagcatccttttcatcgacgacgatatcatcctctacgccgcctaccttgcctaattctgcttcgacgttcacccctacttttaacgcgaggtctacgacttcttttgtgcggcgtacattttcttcatatgaatgcatggatgcatcgatcatgacggatgtatatcccgctcgaatacaggtgagaatcacatcaaagtccgtgcagtgatcaaggtgcagaccgattgggatttgatattgatcagccgccgctttgactgtatctgcaatcgcttttgctccaagtgattgaaccgttccaaccgttgtttgcaaaatgacaggtgattttaattctgcggccgtttcgagcacccaataaatactgtcaaaggaatgtacattgaatgcaacgattccgtatttttcttttttcgcagcctcaagcatcggtgttgttgaaagtaaaggcatgatcaaacatcctctctcgttaaaatatctgtttctaaaacagtaagcatgtcttcatttgttcttgtttccagtagcttttgtcgtttcgcttcatccattaatcctcgtgaaagggcagaaagagcctttagatgagtggtgcccgcttcatttttggggatcagtaaggataagaagaaaaagcatggcttcccatcaaaagcgtcccattcaatgcctgtttccgtgcggacgatcacgagtgctggttttgtgatggcttctgtttgtgtatgtggaatggcaaatccatcttgaaatccagtcgtgctcagtgcttccctttcagctaagccttttttgacatcctctgctgatgtacaaatacctgctttgtaggcaatgtcagcaatggctgtgaaaacgccagcctgtgaagaagctgtttcatgaagattcatatagatatgttccatcatttctcttcctccctattaaactgcgggtttgtctatttttttacggtaaagtccgtatagaatggcacctacaagtgatccgatcagtatggatagtacccactgaaatgcacctgtgacgactggaaggacaaggaatccaccatgcggagctggaacctgtacgccaaatagatacgtcaatatagcagagatggctgagccaaacatgataattggcaggacaacgatcgggttttttgccgcaaatgggatggcaccttctgtaatatgtgtcgcccctagaatatagttgattgcccctgcatttcgttcctgcggtgtgaaatgttttctgaaaatcgttgtggcaatcgcaatgataagcggcggtgtgatacatgctgcggacacacctgccatgaagtaaaggttgccttgtgcaagtaaagccgttcctgtgacataggctgctttgttaaaaggacctcccatatcaaatccacacatcgcgccaacaattaaacctaagagcagcgggttcgtggattgaacagctgagagaaaatccattaatgaattatttaggcctgtgatcggaactaatagtggtgtcatcacagctccaatcaagaaaataccgataacaggatagatgaagattgattttaaaccgtcaagtgatgcaggtaatttttgaagcaggaattgaaggaatacgatgatatatcctgctgcaaaacctgcgataataccacctaagaatccagcgccaccgtcgtttgcaagcaggccgccgataaatccgacaaccatccctgggcgtctggcgattgaatcagcgataaatgctgctaaaataggcaccattaagctaaagccgagtccaccaatgctttttaaataggcagcaaacggatgatacgtttcatgctgaggatcagctgagtaaataccgaatagaaaagaaatagcaattaagactccgcctccaacgacaaatggaagcatgtgtgatacaccgttcattaaatgtttgtagatcgtgtgtatccatttattcgtcgtcttttgttgagaggatgaaggagcagatgttttctccgtcccaggagcccttcctttcacttgatgaacgggtgcatctccattgataatgccttggatcagttcttctggcgtgcggatgcctttcgctacaggcacttcaatcagtggtttgccgtgaaaacgatctgtattcacatctttgtcagctgcgacaatgaccccatcggcctccagaatgtcttgatcggttaaagcgttttcaattcctacttgaccatgcgtttcgactttgatgtcgacccctaattgctcagcagctatttttaatgcctcagctgccataaacgtgtgtgcaatgcctgttggacagccagttgcagcgacaatttttttacggctcatatctgattcccccttatatctagtgaatgtgtacttgctcaattaatgaatgaatgtcatgtaaatcacttaagcctttagaaaatgcagtagatgcgcccgttgcaatgccgtaacgtaagcattcttcaggtgaatgaccttcaagctgtttactaagaaaggctgcgagcattgcatctccagaacaagctgtgtttaccacagtgcctgtcggtgcgtttccttttaagatgacgtctttcgtaatgaacaaagccccttctcctccgcgggaaataagcacttgctctgcacccatctcaatgagtttttctcctgattgaatgagttctttttctgacataggatgtattttgccgaaaaaagcagcgatttcttcttcattcggttttaataaatacggcttgtattgaagcgtctcaagaactgctgcggagcttgtgtctaaaataaacttaacgttgtgctgatgacaaatagctgctacttctgaaaaaatgctggcgggtacgccctttggcaggctgcctgacatgataaggatgcccccctgcgggatggccgctattttttcacgaaaggcgtgaagcgattttgcttcaatcgcaggtccttggttcacgagcttgtattcttctgtcgtattaataaaaacattaatgcgtgtaattccttcaaccgagataaaatcggtttgaatggaaaggtcctttaaggattgttcaatataagagcctgaaaacccagcaataaatcctaatgcagtgctggtgaatccatatttctttagcataatggagacattgactcctttgccattcggctgatagtcttcatcttctgtgcggttgactgcatttgccctcatttcttttaatgcaatatataggtcaatagcaggatttaaggtgcaggtataaatcaattggtttcaccttctttcttttctctaaagaaagtatctcatacgatggagtgaaaatgttttcagattgtgtaaaggttttcatgataaaaagccttccagatcaaagtctcgaaggcttcttaagcggttatttcattcggatcacataggcatctagtaaaatgcgggcaatgacatgaagagacaggcgcgatctgacttcataatctgggaagaaagattgttcgcctttatatccgactagagtcatatctgatattttgcttaatgtagaatctattcttgtcgtgacggtaatggttgtgacttgcttcatgctgagattttgacacgcttcaacgagctctgctgtttcgccatttaatgaaacaaagatcgcaagttcatttttaccaatatctcgtgatttcagccgaatgatattcgggtcgtcgtgtacttcgcatgtttttccgatgagctgtaatttgatggtcatttctttagcaatcatctctgagaaccctctgccgaaaatataaattttgtccgcattatgtattttttgaacggcatcttcaatttgcccaatactttgcagctgaatcgtctttaaaacctcttcttcatttttccgaatcgctagtttgatgtcttcatcgatgttttttagctgatcacttgcatcggtcattttcttttcttgtttcaatcgatacttaaaggaagtatagccgttgtaaccaatttttttcatcaatctgacaattgtggctgtcgacacattcgctctttcacttaatgtgacgatggataaggtggagatatcctctagatgctggtgaatataatggagtaaataacgttctgtttcacttaacgtttgatacacatcgcttggaatgttaaatagtggttcattcaattcgattcccccttactcatttcatactataattaaatacccaataaaaacaaggtgattcttttgtcatatattttgatggaaagccaaaatgagtgaaatttgatttttgacatacactaaggaaaagttgtgtctgtgtgaaaggagctgatacctatgcttcatctcttgttttttctcatccttctctatgtcgtctatgtatttttgaccgcatttgttttgttttatttaccgatacgaaaaacatgcaaagaacattgtatttataaagcctcttctatctcaggagacgatcaggggacaaatcaagtgatgcttcttgacgatgggtttgaatctggtcaggttagaatccaaatgattcgtgaggcaaagaaggtgatccgtctcagttactattccattcaaaagggaaaaacagccgaatgggtactaggtgctttaattgaagcagctgatcgaggtgtgaaagtccaggtgttgttagatggcatttgtcacagtttgcgcgggccgctgaagcatttgcgctatgcggtggcaaatcatccgaacatgtcgattcgtttttatgagccctttcgtttgttcaagccatggacgtggcataatcggcttcacgataagctgctactagcagatggtcgagtggctgtgatgggcggaagaaatatcggtgataaatactttgcagatcagccgccgaaagactttgcttttgaccgcgatgtgctgctctataacgccaaaaagggaaaagtattagatgaaatggagcaatatttcgtttatctatggaatcatgattttacgaaaagaacaaaagatgtgttctccaagccaaaagcgaaaaaagggttaaagcttagaaaacagctgctcagatcctatcaagaagcagtgcgcacaaaagaaccttttgtgatgtcctcctttgattgggcagcagatgccacttcagtgaaacagattgcctttttcacaaatcctgtggaacgcttcaataagcggccgcttgtgctgaaaaaactgaacgatcttgcgcaccgggcaaagcgttctgtgcttatacaaacgccttatgtcatcccaacacgcccaatgaaagccggactcacccccttaggtagtgagattcaaacgacaatggtcacgaattctcttacagcgacaccaaatccgttagcctttgctggatatttaagcactaaaaaggaactgatgaaaacaggcgttcatttgtatgaatatgaaggcccctattccattcatgggaaatcaatggtgattgatgattacttgagtattattgggacatataacttagatgcgaggtctagttttttaaacacagagtcgattttggtgattgacagtgccccgtttgcgttatcacttacacaggcaatcgaacgaaaaatcgcctacagtaatctcgttgctaaagaccgaacagcctatcatgcgagcgcatatgggcagaaaaaaaagcctttgatgaaaaggctccttttaaatggattatccgcgataacggtattatggcggcgattgatttaaaaaagggcggctactcttgtggcagccctttttcttgcgattgatctttttctgctgactccaatttggtcaatttaaacactaagatcccagcaacaatcacaatgacacctaatagttttgtaaaagaaaatgccactttttctaacccaagccagccaagcgaatcaaacaaaagagcgcagcccagctgtgacgtgaggacaatcgagatgccataagtcggtccaagacgtttgatactctgaacaagacaaatgaccactcctaccccaatggctccgctgatccagtaccaagcttccatatgtcttaattgaaacatgccagttccctctagtaagagacccatcaggagtgaagcaataaagcccattccaagaacgagggttgtagttgaccaagagcctgtatgctcattgaccttactgttaaaaatggtttgtaagctgacgagtgcgccagcagtgatagctaatagtattcctatgatcatatataaatcccttcatttcttctattcataaatattgtgctctgctatttctaggagccctttccggtcacaaatcgtaatctctcctctacgcctctctatcagccctttttcacagaattgctgaatgacccggttaatatgacgatagcttgtaccgattaagcttgccgcatcagtgagacgaagggcgctcgcgctgtcatcatttgttacaacagacaataagtagcttgcaagcctgacctccacaggatataaaaggtggaaactcaaatcgtttgattttgtataaaatttgtttgtgatgccttttagcagaaaggttaacacgcgtgggtcatccttcgcatggcgcatgagcgcttgatgagaaacccttagcatatgtacttctgtgacagcttcgactgtattgaccatatccgtctgctgaacgtattcaatatctccaatcgcttcaaggggatgtttaaagctaagaataaaggtcttcccttcctttgtggtcgtgaaaatctttaattttcctttcactaacaagtacaggtactccctcttatccccttttgaacaaacgagctcaccctgctcatagcgccacaagctcacgtgtgatatgagcttttgatgaaagacgttttctaattgatgtgccttcatatatgaggcaaaaagagattcatcataaagctcctccatctgacgccctcctttatagctttaaaatgatcacgcctgcgaccatcagtaatattcctgcataatgaggccatttcattttcttcttctgtacaccaaaccatccttttgcatcgattgcaaaggtaaaagcaagctgtgcaataagtaacgctgcgatggtgagtgtgacaccgatcatttgaatcgcggtgacttcattaaaaataataatggctgcaaatgcgccgcctattaaataaagtggccgcaccttttgatattccctgaagtgcccgtctcgaacgatcagtaagatgacaagcgagatgataaaaccggttagctgtgtgatagttgctgcctgccatgtgccgatatcctggctaattcttgcgttggccacgccttgcagtgtaatgcaagcgcctcctaataaagcgaaaataacacctttcattcgttcaaattctccttcttttttcagtctagttccattaaatgatacatgcccatctattgaaaaggacatatgtcccactttgcgtattatatcagaaactttttcttttgcagtttcttcgttttagatttttcacagtgggtacagttttatatcagctgaaaacagaatattgattgaatcacatataaaaaggagacatgtcagaatgagaaatcaagagaaacattttattaacggagaatggattgcttcaacaggaaacgaaaagacagaggtcatcaaccctgcgacagaagaagtcattggcaccattagcttaggaacaaaagaagatttagataaggcagtgaaagcagctcgtgccgccttcccttctttctcgaaaacatctcgaaatgaacgcgtgaagatgctggaaaacattgtgcgcgggtacgaaaaacgcaaggatgaacttgtagaagtgatgacacaagagctcggtgcaccgctgaaagtatcagaagaagttcattacacaatgggctatgaacatttttctaaagcagcggaagcacttaaatcttatacatttaccgaggaccgcggcggacataccattataaaagaagcgattggcgtcagcggattgattacaccgtggaacttcccaacgaatcaaacttctcttaaaattgcgggtgccattgcggcaggctcaccagttgtcttaaagccagcagaaattacaccttttgctgcgatgattcttgcagaaatcattgatgaagcaggcgtaccgaaaggagtcttcaacttagtaaacggaactggtgacgtgattggtgacggtattagctcacatcctgatattgactttgtttcatttactggatcaggtgctgtcggctcgaagattatggaaaacgctgctgacaatgtgaagaaagtggctcttgagcttggcgggaaatcccctcttatcgtcttagatgatgcagatgtggatgaggcagcagaaaccgccgttcatcatattgcgatgaatacaggtcaagtgtgttctgcggctacgcgtgtgcttattccagaatcaatgaaagacaaatttgaaaaagcgctgctgaatgccctgccgaagtttacagttggtgatccgagagaagatcacgccacaggcccgcttgtttctaaaaagcagtgggatactgtgcaatcttatattgaaaaaggaatcgatgaaggtgctactctgcttgcagggggaactggaaagccggacggaatcgataaaggatatttcgccaagcataccattttcaccaatgtaaaaaatgatatggccattgcgcaagaagaaatattcggaccagtcatgagtgtcatcacgtaccaggacctcgatcatgcccttgagatcgccaatgatacggtttatggccttgccgggtatgttgttggaaaagatgaaaaaactttaaaatatgtagctgaacatatccgtgctggccaaatcaccattaacaatgccgaaacagattactttgccccatttggcggctttaagcaatctggtatcggaagagaatggggagacttcggcatcgaggaatatttagaagtgaaagctgtgatgggacttccaacggcataaattgagaagggagaaaaactctagggtttttctccttttttatttgtgaattttaagaagtgctcattgccctcctacttatccataatgattttatatttttcgaccgttgctttaggaggaaacgattcttgtaactcatcaaaccagatctcaaccgtttgaccctgtgccagctctttagtatcaactttcgataaatccataatgatgagatcatgtttatacttatcaataagaaggtgagtattcaatgaataatcgctttttagaggagttttattgtttataagaagtaaaccagtctcctctttactcagcagtatgcctttttttgaaaaaggcgttgttgttttattcttattgtatgaatcctttatattgtcctttggagaattgcacgctactaataaaatgagaaaaatcaagaagacaaaccgaaaacattttatgtttttaaactttagctgcatcaactttcctacaccccttttcaattcttcacgatagcttcttcatgctagcattctcagaacaaaacgcctatttttcttaaggtgctttataagttaagctgatttaccttcaagttcattcaccttgtaaaggtattagaaatcttaatcatgacaatcaatattatatattttacttaatggcaaactttcggtaaagttcaaattgaacctatatatataattcctatcgaattaatctatgtttatatttcttgtgaggtggatatcgttgcaacttcatgtattgaacagtccttttagtcagcagcaggcagacttgctcaatcagctgcttccgactttaacagatcaacaaaaaatttggcttaccggttatttatcagcacaggcagctctagccggatcagaaacggccgctctggcccctactccttctgccgcagcccctgcgcagcctgtcagtaaagatgtgaccgtactttatggctcgcaaacaggcaattctgaaggattagcgaaaaagacagcgcagcatctcgaggagaaaggttttcaagtgacgctctcttctatgtcagattttaaaccaaataatctgaaaaaaatacacaatttactgatgatcgtcagcacacatggcgagggagatccgcctgataatgccctttctttccatgaatatgtccatggtagacgtgcgtcaaagctcgatcatttaagcttttctgttctttcgcttggcgacagctcttacgaattcttctgtcagactggaaaagaatttgatgagcgcttcaaagaacttggcggaacgcgccttataggccgagtggattgtgaccttgattatgatgagccgttttctgaatggcttcaaggggtgacatcggcacttagcgaaggtgaagccgcagcattcccgcaagaatcagcaggagcaaccaaccaaacagcagcttctgaatactcaagaacgaatcctttttatgcggaagttcttgaaaatatcaacctaaatggccgcggttctaacaaagaaacccgccatttggagctctctcttgaaggatcaggacttgtttatgagccgggtgacagccttggtatttatccaacaaatgatcctgcgcttgttgatgaacttctcacgacatgcggatggaatgcagaggaagccgtaaccgtgcataaaaacggcgacactcttcttttgaaagaagcactcacctcgcactttgagattacagtattaacaaaaccccttcttcaaaagatggcggactttacaaaaagtgaagccctccatgcccttttagaagaagggaatgaagaaaagttaaaagcgtatatagcaggaagagatctagtagatgctgcgcgcgattttggtccttttgaaggaacagccgcagatttcaccgctattttaagaaaaatccctgcacgcctttattcgattgcaagcagcctgaaagccaatgaagaagaagttcatttgacaataggtgctgtgagatatgatgcacacgggagagaacgccaaggtgtctgctccatcttatgtgcggagcgcttagagccaggtgatacactgcctgtttatatccagcacaaccaaaactttaagcttcctgaaaaccctgatgcaccgatcattatggtgggaccaggcacaggtatcgctcctttccgttcgtttatgcaggaacgagaagaaatcggtgcaaacggaaagtcatggctattcttcggtgatcagcactttgtgacggatttcttatatcaaactgaatggcaaaagtggttaaaagatggtgtcttaacgaaaatggacgtggctttttcaagagattcagaggaaaaggtatatgtccagcaccaaatgaagaaacaaagtaaagaattattcgaatggctggagcaaggtgcctatgtatatgtctgcggagatgaaaaacatatggcgcatgatgttcatagtacccttctatcgatcatccaagaagaaggtgcgatgagcaaagagaaagcagaaagctatttagccaatttgcagcagcaaaaacgctatcagcgtgacgtatattgattgatttgatgcttgaaagaaaggagcttttacttacatggtgaagacagcattaacagcgccggatggacctccgagcgacgtagaggaaatcaaagaaaaaagtgattatttacggggtacgttaaaagaagtgatgcttgatccgatttcagcgggaattcctgatgatgacaaccgcctgatgaagcatcacggcagctacttacaggatgatcgagacctcagaaatgaacggcaaaaacaaaagcttgagccagcctatcaatttatgctgcgcgtacgcctgcctggcggaatcgccacatctaagcagtggctagtgatggatgagcttgctcacaaatacggaaacggtacgttaaagctgactactcgtgaaacctttcagcttcacggtattttaaaatggaacatgaaaaagaccattcaagacatccattctactatgctagatacaatcgctgcttgcggcgacgtgaaccggaatgtcatgtgtacatcaaacccctatcaatcagaagtgcaccatgatgtatacgagctggccaaaaaattaagtgatgacctgcttccgcaaacgagagcgtatcatgaaatttggcttgatgaggaaaaggtagcggcaacgcctgatacagaggttgagccgatgtatggcccgctttatttgccaagaaaattcaagattggtgtggcggtccctcctgctaacgatattgatgttttttcgcaggatttaggcttcatcgcgattattgaaaatgatcaattagtcggctttaatgtcgcgattggcggtggaatgggcatgacgcatggtgatacagcaacctaccctcagctggcaaaggtgattggcttttgtacaccggatcaagttgtagagattgccaaaagagtgattaccattcagcgagactacggaaaccgttccgtgcgaaaaaatgcccgctttaaatatacagtggaccgcctcggtcttgagaatgtaaaagaagagcttgaacgacgccttgggtttgcccttttagacgcaaaagattatcactttgatcataacggagaccgctatggctgggtaaaaggcatcaatggcagatggcattatacgatgtttgtagaaggcggacgcatcacagattatgatgattatccgctgatgacgggcattcgtgaaatcgcaaagattcatacaggtgacttccgcttaacagcgaatcaaaatttgatcattggaaatgtcacttctcataaaaagaaacaaatcgagcagctcattcaggagttcggtttatcagatggccagcagcactctgcactccgccgcagttcaatggcctgtgtttctcttccaacatgcggcttagcgatggcagaagcagaacgctaccttccacgcttgattgaccgaattgaagagattgttgaagaaaatggcttaagtgataaagaaatcacgattcgaatgactggatgtccaaatggatgtgcccgccatgcgctaggtgaaattggctttatcggcaaatcacctggcaaatacaacatgtatcttggcgctgcgtttgatggcagcagattaagtaagctgtaccgtgaaaatgttggtgaggaagacattttaaacgagcttggctctctgctccctcgctatgcaaaagaacgagaagaccaagaacatttcggtgattttgtcgttcgggcagggattgtcaaagaaacaacagatggcacgaattttcatgtgcaatagaaaaagacaggacactctcctgtcttttttatggattctgtttccgtttcaagtattcgcaaatgcttttgtacacatgagggttttctaaagaagaaagatctagtgaaggctgctgttcataggctccttttaataaacgccggacgatttttccgtttcttgttttcggtaaagttgaaatgagatgaatttcctttggcatgagcgcttttcccgcgtgtgaaccaacatgtgttttgagctctcgaatcagttttgcttcgtcacaagattgtgagctagtcacgatgaagcacacgagtgcctcccctttcacctcatcctttaccccgattacagctgcctcgtgtacggctggatgtccgacaagaatggattcaatttctgctggaccgacacgttttcctgctgaattaatgacatcatccgatctgcccgtgatatggaatgtgccatccgctgattgcatcacccaatcaccatgtgtccacaccccatcaaatcgtctgaaatacgtgtcttcatatcgccccggatctttccaaaaaccacaggtcatgccgacccatggctttttcaaaacaagttctcctacttcatttatgacgctctgacctgcttcattatacacatctgccgccattcctaagatcgccgcattaaaaaggactggcttaattgggcgaagcagcgtacttcctacaattccgccagagacctctgttccccctgaataatttaggatcggaatgtgcttttgaccgattttgtcaaaaagccattgccatggtgcttcattccacggctcacctgtagaaatgatggctttgacatgtggcagctttgtacctgcaaggttttgctgcatcgcagaccgaacaaaagtaggtgaaagtccaaaatgggtgactttttgcttgtggatgaatgaccagaggtgctgttcatctggataatcgggtgcaccgtcatataaaacgattgcagctccattgatcaagccgccaaagacgagaaatggccccatcatccagcccatgtctgtgagccaaaacaaacggtctccttttgcaacgtccatacaaagaccggcgtcaaaagcagcttttacagggaagcctgcgtgtgtatggacagctccttttggcgtaccagttgttccagaagtatataagatcatgagaggctcttcatttgtgagataggtcatttcacttaacggatcttcttttaacaaatcgtttagcctgatatctccttcatattcagtatgagagggagtgtgtacaatgacggttttgacagtgtctgttttgtgaatcgcatctgccgcacattcccgcatattgatcgtcttcccgcgtcgcgtcatgtcggagcctgtgacgacaatggttgcacctgccgcacgaatacgcacggcaagaggctcgcttccatatccggagaagacggggctaaagatgacaccaatttttgcaaaggctagcatgacggcaaccgtttcaggaagcattggcatataaatgaccgctacatctcctttttgaagcccattcttcaaaaaaccagcagcgaggcgattaaccttttcctgaaggtcgagatacgtccatttcctctctgccccaacttcatttctccaaatcacggctggctgatgctgggtctcttcgttctctgcccatttgtccacggcggtttcggttatgtttagttgaccgcctttataccacttcggccacatgaatgaatcttgacctaatgcggcttcatacggcatcttccacttgatgccgaccgccttttcagcttctctccaaaaccaatcggtacgctcgatactagctttgtagaatgcatcataagtagagaaaccaagtgagtgcatccatttgtaaagacgtgtatgtttgaccttctgctcttccggtacccatgctggtttcaggttcatcataaggatgccccctttagaccggatagaccggatgttttcgtcttgtaaatgtcatctcttttgaggaataggcttgtaatcgatgacaaagctcagctcgcaggtggtcaaacgggatgacgccatcgacaatcatttcagaggcaagctcatatatattcatatcttcctgatattccttacgtttctcttgtataaatgcagctctctcttcggcaggcagctcggcaattttattcgcatagacagcattcacagccgcttctggccccatgacagcaatttgcgccgatggaagagcaagacagcagtctggttcaaacgctggtcctgccattgcatataaccctgcaccgtatgctttacgcacaatgaccgatattttcggaacagtggcctctgacatagcggagatcattttcgccccgtgtctaataatgccagcttgttccacttttgttccgatcataaaccccggtatatccgcaaggaaaaggagcgggatatgaaaggcgtcacatagctgaataaacttggcggctttgtcagctgagtcatggaataacaccccgcctttcaccctcggctggttggcaataagaccaacaggctgaccattcatgcggccaaagcctgtaatcagctccgcggcaaacagttttttgatttcaaaaaatgacccttcatcaatgagtaaatcaatgagctgatacatatcaaaaggggtattctgccccttagggataaggtcttggatggtcatctcagatggctgaggtgctttggcggctgcccgttttggtttctctgtatagttggcaggcatgtaggttaaatagtcgcgagcgatttgaatggcttcttcctctgttttggctaaaatatcaccacatcctgatatgctgcaatgcatgtttgccccgcccatttcttctagtgatactttttctccaatcaccatttcggccattctcggagagcctaaatacatcgaggcattcccttcgaccataacgacgatgtcacaaaaagcaggaatgtaagcacctcctgctgcagaaggaccaaatagtaaacaaatttgcgggatacgtccagacagcttcacctggttataaaaaatgcgtcccgcgccccttctgcctggaaacatggcaatttgatcggtgattcttgcacccgcagaatcgactaaatacagtatcgggcagttgagcttttccgctgtttcttggattctaatgattttttctaccgttttgacgccccatgatccagctttgacggtagaatcattcgccatgacgcaaaccgtttgcctattcatccgccccgtccctgtgacaaccccatctgctggtaaatgttgatctttacactcggcaaacatggcatcctcaatgaaagaatcctcatctaataacaactggagccggtcacggacgaacaattttcctttttctttgtttttttgatggtatcgttcggctcctccttttacaatccgctgttttttcacttcatattcttcgatcatgcccattcccctttcttgctagttgcctcggtaatgaggcgttcgtttttcttggaaagcttgaagtccctccattcgatcttctgtatcaatgagccgtacataggcttcgtattccttcatcagacctgtacgtaaatcatgatcaaggctcatttgaatcgcttgtttcgcttcttttaaagcaattgggccgtttttggcgatttgttttgcgagagaaatggcgtcatccataagagaatctgctaaagagaggtgctcaatcaacccgatttgaatggcttcttcagcttgtaatgaaccacctgtgaaaatcagttcttttgctttaccgagtccaatcaggcgcggaagccgctgggttcctccggctcctggtatgatggctagtccagtttctggcaggccgagtcttgctccggctcgtgcgatgcggagatcacaagccagtgcgagctcaaggcctccgccgagtgcgtgtccattcatcacggcaatgacaggcacaggaagggagtcaatttctgtaaaggtttgctgaatcgacagaaccgccgcttttgcttcttcttctgtcatcagtcgtcgctcttttaaatcagctcctgcgcaaaaaacgttagaaccatctcctgtaatgagcagacagcggatgctttcatcgtgtttgatttcttgaatgatttgattgatttcctcaagcatcgcagcggatagggaattcgcttgttccggcctgtttaaggtcatgatcccaatccgttcatcttgtatcataaaattaaccaatgatgtcatgtcacattcatcctttatgaagtagtatgagagtgaaaagcacgtaaacaatgactaggcagggttcgttctacttttgtttcgatccattctgccgcttttatcaatgcaggaaaatcgatatttgttttaattcctagtttttgaagcatatgcactacatcttctgtcgcgacatttccgctagagccaggtgcatatgggcagccaccaagcccgccgctagaggagtcaaatgttgtgattcccgcttttaatgccgtataaatattggcaagacccatccccttcgtatcgtgaaaatgtagagcgattttatcagcaggaaaacgttcaagtaaaatgtctaatcgcctttctacttgaagcggatgggcttctccaatggtgtcgccgagtgatatttcatcaatgccataagagagcagaatatccgttaaccgcagaacttgatccattggcacttgatgttcataagggcagccaaacacggtagaaatatatacgcgcgtgatctttcctgctgcttttaaatcagctgtcatttgtttgatgacaggaagtgtttcgtggatggattgattcatattttttttgttatgtgtttcactcgaagagataaacatagcgcctgcgtcaagatttgcttcaaaaaagtgagccaagcctttttcattaggaatgagtgctgcataggtgatgttgtcatttttgtgtaaggattgagctaactctttggcgtcttttaaggctgggacccatttaggatgaacaaatgaggtgacttcaatataagggagccgggctgctgtgagcagttcaatccacctttgcttctcgcttgtgtccagccaagtggattcattttgcagtccgtcccgcgggccgacctctctgataagtacacgctttggtaatgccatctcgctccctcctattctgtcagctctagaaggacctctccttcatcgacaaattccccctctgccttatacactttgctgatgacaccagcctcttctgcaacaattggaatctccattttcattgattccaagatagcgacctcctgccctttttgcacttcatcgccttgtttcacaagaagcttccataagtttccggccatttgtatcgtgaccattttcatgaacggttcccctccctttttttcatgagaaaatcggttgtgatgctgccatgtaagaaagcagaagatccagccatttcccttaaaagcggtaagttggttttgatcccttctatttcatatgcttgtaacgcattttttaatcgttctattgcaagttttcgtgtatcaccgtaaacgatcatcttcgcaatcattggatcgtaatatggggtaatgacgctcccgcttgtcacacttgattcatggcgtatatagggagcttctggcataaatagccgagtgattgttcctggtgacggataaaaggtaacggggtcctccgcatagattctgacctcgatggcatgcccaatttgatgaatatcctcctgaataaaggaaagcggctctgatgcagcgattttcagctgctcctcgacaagatcaatacctgtaatttcttctgtgacagggtgctctacttgtaatctcgtgttcatctctagaaaataaaattgttggttttgatcgactaaacattcaatcgtccctgcattttcatagccaatggctttggctgctttgacggccatctgtcccatctgttgtctcaccgattcatcgagacaggcggcaggtgcttcttcgatgattttctggtgtcttctttggagtgaacagtcgcgctcaaataagtgaaccccatggccgaaggaatcaaagaggacctgaatttcaatgtgccgcgcgtcttcaatgaccttttccatataaagcgtcccgtcgttgaaaaaactttgcgctcttttttgatttccttcaaaagctttatgcagctcctcgtcatttcgcacaagctgcatgccaattcccccgcctccgcttgatgccttgagcatgatcggataaccgagtgactgggctttactgactccttcttctgcgtcatggagcggggctgaaacgcctggtacaatgggaatccccgcatggtccatcgtttttctcgcttcaattttattccccattcgctgaatgacctgtgcggatggtccaataaaaataattccttcgctgcggcagcgttcagcaaagcccgcattttctgataaaaggccatatccagggtggatggcatctgtatttgtctgcttggcaacctcgatgatcacttccatgtttaaatagctttcagatactttcgcgcctccaatgagataggcgctgtctgcttcttgcacatgaagcgcatgctgatctgcctctgaataaacagccacggtgttgatcccgagccttttacaagtccgaataattctacgagcaatttcgcctcgattcgcaatgagtacttttttgaacatcgctgccctcactcctttattagatcaagcgcctgttttttcagacgaaatttttgaatcttccctgatgcggtcatcggatactcgtctgtgatgaaaaaatattttggaattttgtagcgagccatttgtgactgacaatagctggttaatgactcaatcgtcactgtgtgaccttgtttgagccgaatgaatgcggcggcttcctctccataggtctcgtcaggaataccaacgacctgtgcatcaagaatggctggatgcgtgtaaagaacgtcttcaatctcttttggataaacattttccccgcctctaatgatcatatctttcagccgtcctgtgattttcacatagccatcctcatccatctccgctaaatcccctgtataaagccacccgtcctcatcaatgacttcatttgtggcttcttcatttttatagtagcctttcatcacatgatagcctcttgtacacagctcgccttgttctcctctttgtacttcatccggcgtacctggggcggtgatttttacctcgatgtgaggaagtgcccgaccgactgtttgaacccgcctttcaaatgaatcatctgttcttgtttgggtaatgacaggtgagctttcggtctgaccgtaggcaatcgtgagctccttcaggcccatttgttcaatgactgctttcatcacatgggatgggcaaagagatcctgccataatgcctgttcgtaatgtggacagatcgtattggtggaaattcggatgatcgagctctgcaatgaacattgtcgggacgccgtgaagaacagtgcacttctcttgttccactgtttgaaggactcgctctgggtggaaagattcaattggaatgatcgtgcctccttttgcgagacaagcaagtacgccaagaacagatccaaagcaatgaaagaacggcacggggatacacatgcggtcttcatgggtgagcttcatgcaatctgcgatctgactggcattgcagacgatgtttgtatggctgagcatgacgccttttgggtagccggttgtgccagaggtatattgcatattaataacgtcatcaggcgccagctcatccattcgtttctcccatgcatcatcctccattcttttagcagcagcttgaatactgtcccagctgcgcatgccctttggcgtgtgctcgccaatatatacaacactttttaaatatggaaatgatgatgaagtgatctcgtcttgatgagctgtttgaagctctggaatgaggttttcaagcatcctgacatatgatgtctctttaaacccgtcaacgataaacagcatgctgctatcagagtgctttagtaagtaagcgagttcttgtgattgaaagttcgtattcacggtgacaagaacggctccaatggaggcgcaggcgaattgcagcatgagccattcagggacattaggtgccatgatggcgatatgatcccctttttgaacccctaatgccataagacctttccctgtttccttgacctctctaaaaaacgcttcgtatgaataacgtaatgaacgttctggatacacaatggcttcatgtgctgggtgctgctcctttttctcttttaatagggagccgatcgtttgtggatgaatcgacatcatgattttcctcctccatcagtggtaagcgttttcataaaagggttatgatagcagttgtctcgcgatgactagacgctgaatttcagaggtgccttccccgatttccatgagcttggcatctctcacaagccgttctaccccgcactctttcatgtagcctgttcctccgtgaatttggacagcatcaagacttgcttttgtggccatttccgaagcgaaaagcttggcataggcagcttcttttgtaaatggcttgccatgatctttcagccaggcggctttccacaccatttgacgagcaagttctatttgcatcgccatatctgccagtttaaattgaatggcttgaaaggacgagagggtctgcccaaattgctttcttccctttgcataggagagagaagcatctagtgcagcttgcgcgataccaacagataaggcagcaattgatatgcgtcccccgtctaatgtatataaaaattgcttgaagcctttggctgggtctcctaatatatgatgtgctggtacacgtacgttgtctaaaatgatttcagccgtatctgaaccgcgcacccccattttgtcgtatggatttgtaatggacagccctttttgacctttttctacaatgaaggcggagatgatcgggcggccgtgctcatcatgatccgtgacagcggtgacgataatggttctggcaaaattggcatttgtgatccagcacttctccccgctaatcacatactcttgtccgtctttgaccgcttttgttttcgtcccttttgcatctgaccctgcatttggctctgttaatccgaaggaaccgagtgctgttccagatgccagcgggacaaggtgatccatcttttgctcctctgtaccgaagtaataaagcgggcttgcgcctaaggaaacggctgcggcatagctaaggcctgtactggcacactgttttccgatttcttctacagcgagcgcatatgagattgtatctcctcctgagcctccgtatttctctggaaaagggatgcccatcaagccgagttcccccattttttgaaaagtttggaccgggaatacggcctgttcatcaatggtttgagcgagtggtgcaatttcttccttggcgaattctttgaccatctgccgaatcatttgttgttctttcgttaattcaaaatccatcttgtttccccctttggctcttttctatcatatttattaatcaagtggctgcttcatgccaagcttggctgaattcagaaaattaaaacaaaaataatagaaaaaagcatgaacgaagaaaatcctcattcatgctttttcgttatctcactctttttgtagaaggcttgctttcgtgatgaagtcgattgagagccgttactttgtaagtatcactcttattctgatgaactgaaagatctttgacagatgtcagcgtgccggtttcttttctaacggtttgcagcaattcatatgttcctttcgtcgtcaagcgatagaccgcgtaataggatgcggtagattgcggatcatttttgatctgtaaagccgcaccctctgctgtctttttaatagattgaatgattggtttttttggcgctttctgatgaagccaaggcatttctggaatgagagccggtttacggtaagcatcttctatcaatcgatttttgacattcaaagggttgcgattgatatcctttaggctaaagtgcatgcttccctgcacgagaggcgactgtctgttcagtttgatctgccgaaagtattcttctggatcagaccaagcaggatcactgttttgattaattttatacgtcgcctgaccaatgtacaggtgaacaggctctcccttcacttcatttgaccaccattttgttagcacatcgtatgcggctgcctgaaagccgatgctccagtaaatttgcggggtgacataatcgatatcgtgctgctgaatccactctcttgtatcagcatacaaatcatcatagttggtcatccctgctgtggtgtttgaaccagtcggatcatcctttatgttgcgccagactccgaaggggctaataccaaacttcacatacggctttactttcttcacggtgtcgttgatttgcttgaccaattggttcacattatctcttcgccaatcttctatatgcgtgaatgccttttttccatatgtttcatacgtttcttgatctggaaacggcacaccggctattttattcgggtaaaaataatcatccatatgcactgcatcaatatcgtagtttttcacgacttcttctatgctgccgacaatgaactcctgagctttaggaatgcctggattgtagtaaagctgattaccgtacgcaatagtccaatctggatgtttttttgcagggtgatcggctgataaacggctgaggtcggtatgattcattgtgattcgatacgggttaaaccaagcgtgaaattcgagcccgcgtttatgagcttcttcgatcatgaattcaagcgggttatacccgggatctttcccttgcgtgccggtcaaatattcggaccacgggccgtatgccgaaggataaaaggcatctgctgtcggtttaatttgcatgatcacggcattcatattcatcgctttgatctcatctaacaaatgaataaactcttgtttctgctctttgacaggcagtcctttctttgaaggccaatctaggttataaaccgatgcgatccataccgcgcgcatctctcttgtgctttcaagcttcccttttggcattggacgagctagactgctagaaggaatcaataagaatacaaacatcaaaattagtgttagacacgtcatactgatttttttcagcattttttgcatcacctcatattcagtttattccgctttttgagatcgaatgccagcagatggtgtcagcaggatgtttttcatttccttgagctgagcttcaggtatttcgcaagcctcgattaaataccgctctgcacttccgtatgtgtccatcatttcgtttagcacatcttccagataatcttgctgcacaccgagaagcggttgaatttgctcttttgacacccggtataaactcatcatgcggacaaatcgctgctgccttctgacaagcattttcacaccttcattggaacgcatatattcacttaaaacggccggcatcggtacacctgctgctaattgaatgagggcagataaaaagcctgtccggtccttaccgctcgtgcagtgaagcatcagcgggtaattgctcttatctgaaagcagcgagaacagctgctgaatctcttctttacgttctgtgagcatactttgatataaatctttcataatcggtgcaaatgaaagagatttcccttcagttgtcagcatacgaaacatggtccacttacttggcatcttactgtcaggctgcatcgggatatgaacgattttgttgtgttccttgatttttggcggatgtgatttgcgttctgagcttgttcggagatcacaaatggtttgaatcctaagctttgagaacgtcaacatatcttgttttgtgagacgcgatagatctgcggatcgataaatcattccctgcctgatcaccatctcacctgttgtttgaagtccccctacttctctaaaattcgcaagctttgaaaatgggttgtttgattgattcatagaagtgaaaatcctttccgttacgttcttttctctatcatacgcttttattgagatggggaaaagagaagccatttggtataatggaaaaaggagattcggatggattggagatatgaagcatgataaaaacaaaacggattcagcaaatcaaagagtatgtgtttgaccgggaatctgcctcacttgatgagcttgtggcgcattttggcgtctcaaaaaacacgatacgccgagatgtacaagcattggtcgaatccggcgtgctcaaaaaagtatatggcggagtcgctgtgaaccattcaacattagtagtatatcaagagcgaaagacccgccagctcagtaaaaagcaattgatcggacaaacggctgctgcttttgtggaaaatggggatatgatttttgttgattctggtacgacaacacttgagatgcttccctatttgactgagaaacaggtgaccgttgtgaccaataatgtagattttattacacaggcgatgccttatgaaaatctcactatcttttccaccggcgggatgcttgagagaaaaacgaattctttcgttggctatcaaagtgtagagcgtttgaaagcttacaatgtcaataaagcctttatcgcatcaactggtttatccattgatcacggagtcacgaattcgtccccacttgaaacggatattaaaaagacagttgttgaaaaaagtgccaaaacgtttttattagttgatgatagtaagttcgatcactacgctttgaccacgttttgtgatttacacgatcttgatgtcgtcgtcacgaataaacagccaagtgaagattatcttcaatatggaaaagagcatgatgtacggtttgccacgccttcatcaaatgagcagacgtaaataaatggatcacaaaaaaacggctcaggaatttgagccgttttttgattcattcatttcaagctgcatgatcatgcggaataaaaaacggtatacggctgagatgacttcaatgaaaggcatatcttcgtggatgtcctcaagctcaagaagctgtaaattcacatcgaataagccgtcttgcccattaaattgaagctgcgcaccatttaatggagccagcatgtcttttaaaatacctgtgtcttttttaggacgttttaaaccgaataacacggtatacgtttgaaacacttcgtcccattcaatggctaatccatcgactctcaccacatcaaaccactttgattcgatataaatgaattctttttgatgtttttttacatatgtaagcggtgtgtttagaaatgaggcgccttctgtttgaatcatgtcctcggattctttgtctacacgctctatatatacatcgctaaagcgtgcctcttcctttattcttgcaccttctaaaggccaattgtggcgcgccgcttcgtcatattcaaagtctggcagcgcttgtccttctttcagtaaatcttgtaagcgattttgcaatgacatggctatgtctcctttcttctctttcatgtgcgtttattattttagcataactcatgaaaagaaagatatgactcagcatatgatggtatgatagtgtcaaaagaaacatctcggaggggtacgttttgctcacaatgacactggcagaaaaaatcgtagacgaggtcaaaaaagtgctgactgaggaaatcatcatcgcacaaacaaacggcaccatcattgcggcaacagatccagcgcgcattggtcaatttcatgaaggggcgtatctgacatcctttgaaggacaaaaacgaatcctcacaaaggatgatgagcagcaaatgaaaggggtcaaagccggcatcaatctgcctatttattttaagcaagaggtcattggggtgattgggatgacaggaaatcccgtccatgtctctccatttggcgaaatattacgaaaaatgaccgaactgcttattcaagagcatgaattttttctagaaacggaaaccgatgaacggcagcttgaagcgtttgtgttcgactggcttcatctgccagagacagcaatcaatctcactgaaaaagcagcgcggcttcagcttgatgtcaaaaaacagcgtgtcgtcgtcctcattgattgtcacgatgaatcgtttatgaagcaggatcaatacaaaaaagtaaaggaaatgctgcatctcacaagtcaggaaatgatcgttcgctggggacatgcccgctttttgctcatgctgcaaacctcggcaaatgatcgtgataccttgcagcagcgtctttttcacatccatgcttccctcacctcacgttccacgtcaaaggttttgataggtgcgggaaaaccagcagctggacatatgatgaagcaatcctttcatcaagcctttcgtgccttaaaattggcgaatgtggatacaccgattgtgtttgatgaggatttaacacttgaactttttatagaagaagtgagtcaggaaacaaaagaagtgttccttgatcgaacgatcgccccacttctcccctaccctgaactagtgaaaacattgcgtgtactcataacatcagattactcattgaagtataccgcggaagcgatgcacgtacatatcaatacactgcattacagactaaaacgtatccaagatttaacgacacttgatccaaaacgcatgcaagatgcgatgctcttttatttagccttgatgctattagatcatcatccaaataaacgaggcgaacagcccaatattttgtagaatcgtccataggcatgaggcgattctttttttatactgaaagaaacggtatgtctaatcagtaggagtgaatgcgcatgttaaattctgaatttttaagtcaattaaaaaagattgtcggggcgccctatgtacaagacagtaaagccgatcggcttgcctactcttatgatgcaacacctaattttcagcatatgccagatgtcatcgtaagcccgcgcgcggctgaggacatccagcaaattgtccggctctgcgcttcatataaggtgccgatcgtgcctagaggatcaggaacgaacctttgtgcaggaacctgtcctacacaaggcggacttgtgatgttgtttacaagaatgaaccaattaatcgaaatagacgaagaaaacctcaccgcaacggtccagcctggtttgatcacacaggaacttattcgccaagtagaggcaagaggtctcttctacccaccagatccaagctcgatgaaaatctccacgttaggcggcaatattaatgaaaattcaggtggtctccgggggttaaaatatggcgtgacgagagattatgtacttggacttgaagtggttctgccaaacggtgacatcatcaaaacgggcggcaagctcgcaaaggacgtggccggatatgatctgacccgtttatttgttggatcagaaggaacgctcggaattgtcacagaagccacgctgaagcttttgccgcttccagaaaccaaacaaacgatgctttgcttatatgaaagcctagaggaagcagccgcttcagtttcggcgattattgcagagcgtattatccccgccacattagaatttatggatcagccgacactgaaagtcgtcgaagactttgccaaaatcggcctgccgactgacgttcaagcggtgctattaatcgaacaggacggcaaccctgaggccgtttcccgtgatatagagaacatcgcaaaggtctgtcagcagcacggtgcaaaaggagtaaatatcgcacattctgaagaagaggcaagtgcccttttaacagcgagacgagccgctttatctgccctcgcccgtttaagccccacaacgattttagaagatgctacagtcccccggtctgaaattgcgaacatggtgcgggcgatcgaagacattgcgagagagtacgaagtgaaaatctgtacatttggtcatgcaggtgacgggaatttacatcctacttgtgcaaccgatgcaagaaatgaagaagaaatgaagcgggtcgaagaagcctttcaggccatttttgaaaaagcagtctcccttggcggcaccattacgggtgaacatggcgtgggtctgatgaaagccccctatttagagctaaaggtcaaaaaagaaggaatcgctgcaatgaaagcaatcaaacaagcgctagatccagcaaatattatgaatcctgataaggtgtttggaaaagcagcaagaaagcgggtggtggtctcatgaattcccctaaacaatcagagattcagcaaaactttcagcagcaaatggatgaaaaggagctgctcaactgcatgcgctgcggcttctgcctcccttcctgccctacttatattgaatccggtcaacaagaaactcactctccccgcggccggattgctttaatgaaggcggtgagagacggcgtgattgagccggatgaagatgtcgaacattcactgaacctttgtcttggatgccgtgcatgtgaaccggtctgcccttccggcgtcaaatatggacgtttacttgaggatgcgagagacatccttcagcagcacaaaaaacaatctcttcctgtcaaatttgtgagacgtgttgtgtttaaaggactctttccttcacaaagtcgaatgcgtcaagcggctggacttctgcgattttatcaaacctctggtctgcaaacggccgcccgcaagtctggcatgctaaaggtgcttccgccgcatttacagctgatggagcaggcccttccaaaggtgccgcgtcaacaaaaaagccgtgcgttagaatacaaagccattggcacggcaagaaagcgtgtggccttttttactggctgtttaatggacaccgttttttccagcacaaacgaagcgaccatccagcttttgcagctggccggctgtgacgttgtcgtccctcctgttcagacttgctgcggtgcacttcatggccatagcggagaaaaggagcaagcgaaacagttagcaaggcggaatattgaagcatttgaggagattgaggcagatgccattgtcatgaatgcgggcggatgtggtgcctttttaagtgattatgatcatttgctaaaggatgatccggcttttcaaaagcgaggtgaagccttctcaaataaaatcacggatatatcagatattctcgtggagcttaagtttcaccggcgtacatcgcttgccttgccagagcagatcatcacctatcaagactcttgtcacttacgaaatggaatgggtgtagagcaagcgccaagggtgctgatgaaggcgattcacggggtatcatttaaagaaatgaaggatgccgaccgctgctgcggatccgccggaatttataatattttgcagccaaagatgtcgatgcaaattttagatcataaaatgacagaagctagtcaaacagcggcggctgccattgtcacgtccaatccaggctgtcatttgcaaatggcagcgggtatcaaacgttcaggacaatcgcccagcatgcgtgccgtccatctcgcagattttttattagaagccgttcaatatggaaaaaaagcgtctagctcatcaagctgaacgctttttttcatgcatatcttcagacaattagttggataatagaggcaaatcgcggaaggagatgattcaagtgctgaagaaaaacaaacaacatcaaaaggacccaaattcagtatttgaggcattgtcacgttcctctgattttacaaacgaattgtcacgaagtgaaggttttctttatcgaatctctttttttcgttctttaattaatggtcatctactccatgaacaaattttgccctgcatgaaagagttgcacctcacccccactcttgaggagctgaaagaacgaatccccattgaacagtctgtcatcacgaccgatcttcaaaaagtggaagaagcccttcatctgggcaatatggccattcggctcgaaacggactggggcaaagcacttctgataccgattgaagaaaagaaaggcagacaagttgggccccccgagattgaatttggcattatcagtgcccaggaagcatttgtggaggttttggataccaatttaaatttggtcaggcggcggctgccgacgccgaacctgaaagtggcagaaaagacagttggcacgctatctcaaacaaaagtagcggtgttatatattgaagaaatcgccaacccgcaaaacatcgaaaccgttctccagcgcattgaggacgttgattatgatcagattttagatgcgaattacctcgctcaaatgctttatgatgtatccaatacgatctttccattgtttttaaatacagaaagacccgaccgcgtgtcgtcaggtttaacagaagggaaaattgccatcttagtcgatggatcgcctcatgtcttgcttgccccgactattttacttgagtatttttccacaatggaagactacaatatgtcgtggatggcggcttcttgctttcggctgttacgcatatttgcagtgatattctccatttttgcgacacctttatatgtagccgttttaacctttcattatgagctgatcccaaaggatttattagaaaccattgtgtcctcgcgctatcttgttccatttcctccgattattgaggccctatttttagagatttcgattgaattactaagagaagcaggttcgaggctcccagctaaagtcgggcagacgctcgggattgttggcgggattgtcattggacaggctgctgtggcagcaggcttaacaagtaatattttactcattattgtcgccctttctgctcttgcctcatttgtcacccctatttacaaaatgggcagtgccattcggctgctgagatttccatttctatttgcagcacagatttggggtgcattaggcattgccgtgatgggatctttcctactcacccatttaatgaaattaacgtctattggaaggccgtatctagagcctatttttccgctgcgtctgacggatttaaagggtagcttgattcgtcctcagctccgctttttgaataaaagaccggaaaatttacgcccgcaaaatgaaaccattcaccggcaaaagcctaagcaaggccgtaaggggaaaaatgatttttatgaataaggaagtgaaagcatgagttcttcttctgtgaaagaaaaatttcaagtttcccctttttttgtgttttttctcatcaatgccaatcaagtaggtgtcggcattttaaactttcaaacaaaccttgttcgttctatgaataatgatggatggatcgccattcttatttctggcatcagcgtcaatgtgatgatctttctgatgtacttgatgtttagaaaggccccttcggatgaatttggtgatatcacgcaatacgtatttggcaaatggattgggcaattattcaacatactctatatcttatattttgcttctttgtcgttgaccgttctcgtccactatatggatgtgatccatgtatggctgtttaaagaaattcctggtctattgtttgcgtctgtactgctgctgcttgtgtattacattcataccggcggctttagaaccattgctggatgggcattttttagcattgtactgacgtattggatgacgtttatttgcttttatgtcatgaaatatagtcacattcgcttcatgtttccgatgtttgatcatacattttcgcagctggtaatgggcgtcaaagatgcctccttatccatgtttggttttggcacgctgcttgtctattatccctttattaaacaagcacagacgtcacaaaaatttgcccacatgggggcattattcacgacatgcttaaatttacttgtctttctcgtctccattgcgtattactctagtgctcagctcaaattaacaaaatggccgacattaacgttaacaagtattgtgaaacttccctttatccagcgctttgaatttattgaagtgtccctctggctgcttctgatcattccaaatatcgccattccattatgggcagcgagccgaatggcgaaacaagtatttcatacgagtcagcgcgtcactttaatctgtctcagcatcctcattttggtcatgttttcgttttttgccggggcaacctcttttgaagcctttaatcaatgggtggaatatagcggatacattcttatatatggattgattgtctgtatggtcattgggctgatgctgaaaaaaaggtgggtgaaaaaacgagcatgaaacgttatatactcatgggtctcatgttgtttagtcttttgttaactagctgtgcacagcctcgccttttagatgaattaaatatctctcaggcggcaggatttgatttagtagaagatggcgaaatgaagggcttcttcgtcttccctgtctttaaaagtgaagagcaaggaagttatcaaatattaagtgcgaggtcaaacaccattagtaatattcagtttctcgtgtcagaaaaatcaccttttccagtggtcatgggccaggtgctcgttattttaatcagtgaaaaattagcaaaagaagtcggcatgatcgatttaatgaattacatttatcgtgatcctatcattggttcacgccaagtgtttgcgattgtaggcggagaagttgaagagttattatacacaaaaatgaatcaaacgaacttgaatattggcgtgtatctctctgatctgttaacccaaaatatgcgaaatggcaatgaacctgtgaccaatcagcatatttttatgaatcagatgctggcaaaaggggtcgatgcttacctcccttacatcaaaaaaacaagcaatgccatcaaggtcacaggagtcgctctgtttgatcaagaaaaaatggtgggtcatatccctggagaagaaacgttcacatttaaagcgatgattgaaaatcataaaaatggcatctacgagtttcaattggatgatcaagcaaagacccatgtcgtcattgaaaatatcaaatcacatgtgtcttaccagatcaaaccaacgaaaaacctaacaaaaaagcctcatatcacgattgatatcaagctgaaaggtgaattaaaagaatttatgaagtccaaaaaaattgataaaccttctatattggaccatgttgaaaaaaaagttgaaaaacgtgtcgctaagcaaggacaagaccttgttcagtcctttaaaaagcaaaacatagatccgcttgggctgggtttgaggtatcgatcaaaagacaaagcaatgacaccagaaaaatggcaggaaatctatcctgatgcggatgtacaaattaaatgccatatgaaaattgttcaaaccggtgtcagtcaataaatgagtgaaaaattattcgaaaatgtcttctttgttattcattattttagacactttcattttgactcgtggcacgcgatctttttgaagatagtcatttaaagtgttctctacttcatttttatctgttctaaggattttaggtgaacattgttccacaaggactggtctattccctttagcgcagtttgccattgtatccagtgcaattaagctgaaaggtcttcctttgtcgagccatgttttcattctatcccaggttggacagcttacggctgccagccttccccaatgatcgtgaaattgggtacaggcagactccatccaatccatgattttgtaagaacggaaacggtacaggcagataaaagcagctgtcggcaattctttttcactgatcgatttcaatttctctatcacatgttgtaaaccctcatcttctggcaggctgctggctgctgcccaggaaagtggataaagaaattcttcgtcagcctgatccaaaagttccctaacccacccagcggcagatgtacctaaaacatcagccgcgatttctatcattcgtgatttcacttcgacatgccgagttacatcaaaccgactttgaacagagtctaagatctttttctcatcgtgctgtttcagagcatcgatgacatcaccctcaagaaaccacctagtgattgaaaagtctaataaagacgccaaatcttgccgaacgtcttgtaatgtgggtgctttatcttctttggtgacgatgacatcatcctctaattggaaagcctgtccgtcctctccataaaagtcatcgtgcagtaaaaattgtttaggagaatggagaacggctaagttataccattcaataggtcgtaatgaatagttgagtagtctcttgtgacacggatgacataattgataaggctgtttcggctcatcagaattctctactacattcattgcgtttttttgacaggcttcacataaagcggctttttccactccattcacttccttttattgcatatgtatgatcttttatatttgtcatcattgaatcatgtgaaaagaacaatgttttctaatcttcgtcctttacatctggatcttcaggaatcggttcatttaaaatctcttggacgagctctttgtattgttcaagctgcttcatatgcgtttgaaactgtccttgataaatcagataggattcgccgtcaaatacatagcggatctttttttgctggattaatttctcaatatacgcttcagctacttctaagtattcagctgtttctgcgattgttaaatacatgtttgtgcaccacccgttcgtttcatctaacaaattatatcatgatctgttgaaaaaaacggatgcagcctgttcatattttctttactgatttgaccactgacatcatgatagttcttcacataacaagtgttcagcaagtagatcgtctaggtacaagcaaatatggtatgataaagtttgctagacgagagtttatcgtcacagacttggtggaaaagccaggcattcatgaggcgtctttcggtttagccgtgagaggtaagcggaaagcatactcatgagaaaagcaaaacaagcataggcttttataaggatgcttgaagaaaattcgtatttaaaggcagagtgaaatgaatgggaaccttgttcaatgaaattttaacctggctgacaagccttggttatgtaggtgtagcactaggtctgatgattgaaatcattccgagcgaaattgttcttgcttatggcggatatatggtgtcaacaggaacaatcggttttgttggagctgttatcgctggcgtcatcggaggtacgctcgcacagtgttttatatactggatcggtctttatggcggaagaccttttttaacaaagtacggaaaatacttattcatccatgaacaccatatcgcaactgcagagcgctggtttgaccgatatggaaccggtgtggtgtttacagcgcgctttattcctgttgtccgccacgccatctccattccagcaggtattgccaaaatgccttttttgaaatttgtcctcttgacaggattagctgccatcccttggtcgatcttatttatctatctcggtatgcagcttgggacaaagtgggatcacattcaaagtgttgctcacgcttatacaacccctattatggccattgcgatcgtcctgatcgttctctatttcgtcatcaaaaaaattcgtacgaaccgaaaacggacaatctaatgaaaaacgccttccactgatcgggtgaaaggcgttttttctatgaatgtgatgattgttttttcatatattgggataattccataatcattgcacccattctctcaagtgacggagctagaattctgtctattccctcttcttttaaagcttcagctgtgacttttccgacggccactgccagtacgtgctgctcgaatagctcttggagttcttgttttctaccccattttgccgctagtgtgaaaaaggcgtgaacctgaacagcggttgtaaaacagacggcatggactttatcatctttcatttcttgaagcaatgtttctgcggcctctggttcaggaggtgtgtgctgataaggtaaaagcggcaaaacatcagcccctttgtcatgtaaaaactggatgagagccggagcgttttccccgtgaagctgcaccatgacgcgtttgccatgaaactccttgtcttcaagctttgagatcatgtcacgaaccgttccatcttcatcagatacgtctggctgaattccgcgttttttgagtgctgcaaaggttttataccctcttgaagcaatatgcgcatttgatagaatgtgcataaatgcttcccccagatgaagctcttctgcactctcaatcaatgtgtctgtcccgatgcctgttgtgaaaatcacccaatccgcaccttgcttcacaaaggtttcaatgcctggctttaactcctctttggctaaaaatacagttccttgaagagaacgaataacggcttgtcctccttgcttttcgacaagtgtacgcatttcttctgtttttctcgttccacaaatggcaatcgtttttccagctaagcctttactcattttatccctctttttctatcacatttgatatgtattaaatatagatttatttggaagacgttgcaagtgtctactaaaaaagagcttgacgtttcggtctaattcgagtatcttttgtaagtgcaaattgtaggaggtcattatggaaaaacagaatgttcaagctattcgattatcaattgcagacccaacaccacttggtttgtttggtttagcaatggtgacgctcgttgcgtcctcacaaaaactaggaattacagatggcacttcccttattttaccttgggctatcttccttggaggcatcgcgcagctaatcgcgtccatacaagattcaaagcatcataatatttttggagccactgcctttggcgcattcggtcttttttggatgggcgttggaacgacttggctcattcaagccggcgtttttgggaaaacgcttgcgggagcagcagatccaaaacaactaggttttgcgtttatcggttatttgattttcagcttgtttatgacgattggtgcaatggaaacacataaagtattatttttgattttcgtctttattgatttcttattccttggtctttcccttagctcgtttggtgtgatgtacgatgtgactcataccattgcaggtatcgcagaattgatcatttccctgctttcgttttatggttcagcagcagttgtgctcaatactcattttggccgtactgtgctgccaattggacaaccatttcgtatttttacaaaagcataaataaaaaagaactgctttgtgcagttcttttttcatgtttatttttcttgtgcctcttggaagatctctccgatgatttcatacgagcgcattctttcttgatggtcaaacatatccgaattaatcatcacttcgtctgcttgagtggcttcaataaaggcttccaattcttttttcaccttttctttatccccgatcattgtcgaacttaattgttcatccaccatcgctttttcatacggactccaaaggccgtccatactgtcaacaggcgctttgagttttcctggagtatttcgaatgagactcaaaaaccgctgataatgagaggtcgccaaatattcagctcgctctgtttgatctgcagcaaaaactgtcacacccaccatggcataaggctcttttaacacatcagaaggtctaaatgactgtctatacaactctaaagcaggaattgtatttttaggtgaaaaatgtgccgcaaaggcaaatggcaatccaagctctcctgcaagtcttgcgctaaaaccgcttgaaccaagcagccaaatcggaatgtctagaccctctcccggaacggctcttacatgttttttgacctgtccggatggtttaaaatattgccgaagttcttctagctgctcagggaaatcttctccgttatgaaggttacgtctgagagctcttgccgttaactgatctgtccctggtgctcttccaagacctaaatcaattctccccggatataatgtctcaagtgtcccaaattgttcagcaatgacaagtgaagagtggtttggcagcataatcccgccagatcctactcgaattttttcggtccccccagcaatatatccaattaaaacggacgttgcagagctcgcaacaccttccatattatggtgttctgctagccagtatctatgataaccccacttctccgccttttttgctaaatccatactatgttcaaaagactccttaatggtgcctccttctgtcacagaggataaatttaaaacggaataagctgtgcgctgtaaaactgattgactcataaatgatgtccccatttctgtcaaaaatcatactagttatatactttcaacaccataacataaaatcatgaaacatttaaatgatttgattcgatgattttcgaaatgatgagtttctaggttttacttcaaatttgaaaatttgcacatagaatgaaatatcaattttaggagatgggcaatttgtacaatcaattcgatcacaaatgtcccttttgcggtaaatatcatgagcagcctcattacaaaagattacgtcttgaccgtcctcaaagaagagactgtccatttatcaatcaagaacattcaaaacaaaacaggtctcgagggaatccccctgtgaaaaaggagaaaaacaatcaaaaacaattcaaagggttggacgaagaggcccagcaggtcccgctgggccaaccggaccaactggacctgctggcggattaaccggcaccctcccttttaacccctcacaatcacaagattacgaggcgggtcaagttgtcacttatgaaggtggtacgtatattgtggactctgctccacctttaggtacgccagatacgtcaccggattatacgcttttggcagcacctgtgctacaggttcaacaggtagcacaggtgctgctggacctactggcgaaacgggaatcaccggtgctactggaacaggtggttttacggatacagcactttatgctgctaatagttctggccctaccattgttactgtagccggaggaacgaatattcctttgccaaactttcaaaacattactggttttacagcaaacggcacaagtactgtttttacctttctgcaaactgataaatattatattacgtatcaagtcaacaccactgcagctcttttaattaatacatgtttgcttttaaatggagcaactactgtgcctggttctgttcaatcacctgttatctctacttcgtttatccataatactgtaatcgttaatttaacagctggaagcatcatttcactgcagttttttggggctgttgccacagctgttttagttggcgggggtgctgctgcaggtgctgccttgaccattatacggctcagctaaacgaaaaaagaaaggctttttcagcctttcttttttatgtcttctattacatttatacaatgttcaatatcatgagactgcaaaaggtgaaaaatagattggatgattgcaaactctaaattccaccattctaataactgcagtttttcgatcatttcggatgaaaaccgatatttcatgaactgctgcggatttcctgcagcaattgcatatggcggcacatcttttgtgatgacactatttgctccgatcactgctccgttccctatacatactcctgacataatcgtcgcgccatatccaatccatacgtcgtgtcctatctgcacatctccttttgatttgggatgtcctttgatgtgggcagcttctttgaaaatttgattaaacggatacgttgtgacccaatctgtccggtgttcaccgccaaggaaaattttcacttcgtttgcgatggaacaaaacttcccaatgtttagtgtcgcaccttccccccatgtcagcacttggaaatctggtccggcataagaaaaatcaccgatattgtgcgagctcagttcacttctttgattcaaaaacatagaagatcagacctcctgaaaagtgatagatcttcgtatgtatatgctgcttcacactttcacattatgactgaacaagcgctacaatttgttttttcttccatacgagctgatagtagccgtattgaaggagtaagttcacaaagaaagccgcaggatagccaatccatatgcccttgatgccaagggatgtgtagtgcgatagcacataagcgactggtacttctacaagccaaatggagcaaatactaaagattgttggccataaaactgttccacttgctctcatcgtggctgcaacaatttgggccgttccaaaaataagatagctccataatgtaatgacgaccaagctataggcaatgtcaatcgtcttagaatctgttaaaaagatagataaaatctgtggtgcaaagagataaacgatgataataatgaatccgcctatggcaaaattgagccctaacccgatttttatcacatctttcaagcggttgatattccctgcaccgatgaattgtgctgcaaagatagagactgcaatgccaagactcactgccggcatctgcacatagctcacgacttgattgacaacaccataggcagctgtggcctgtgatccataatcgttgacaaaagaaataacagcaatttctgataaagaaataaggatcatattaatgctcgatggaatgctgagctttaataatgtttttagtagatcccctttcatcaataaatgctttctcactgatgcatcaatgcgaagcgggtgctttgtcttatataagtagatatgtagaataataaacgtcacaatggttgaaatcacagaagcatatgcagcgccgtataaaccaaatgccggcagtcccatccagccaaataataaaatgggcagcgtcaaaatattcgttgccgtactaatcattaagaaataaaaaggcgtttttgaatccccagttcctcgcaggaaggtcgtgtaaacaaaataaagaaataagatcggcattgagatgaatagaattctggcatatgccgcactttcctccacaatatttgcaggtgttcccatgagatttaggatgtctgttgcaaataaacctccaatgatcgctaaagaaagtccgattaaaaaggtgaatgaaagcgttgtgccaataatttcttttaatcttttttcatttttcgcgccatacgcttgtccaataaggatggaacttcccgatccaattccaatggaaaaagaaacgagtaaaaagaaaagcggaaagaatgcagaaatagcagctactgcatcctctccaatccatctaccgacaagaacgatggatacaagctgtccgattgattgcaaaatattgctaagcaaaagcgggacgagaaaaatggacatggtttttactaaagattgattgttatctaacgtcatgatggtactccttctctatctaaagattctcagctaaaatgctgacaatatggtcttctatctctttccctttttcgtcatcaacaagatgatttaataaaatggaaaaggcgaccgtctttccgctcttcgtgtcaatatatccagaaagtgtgctaaccgttgttaatgaacctgtttttgcacgtactttttctagtgtagctggttctttcaatctgttccttaacgtccctccgaccattcgttcacttgcccctgctaacggaagcgcatgttcataggtcttaaaccatttttccttttgaatgtttgtcaaaaataacgtgaactggttggcagaaacaaggttaataggagatatgcccgacccatctcgcagcactgcatgcgaaggattgatgccaaaagcaggaagcctttcattcatgacatccagtccatcctcaaagctccctttgcttttcacttgttttccaagttcctttagcaacatttctgcatgggtattgttgctgagtttcatcatgggaacaagcagatctgataaaggcatcgatgaatgggtggcaattttcttggcttttttaggaacttgttttgttttaagcggtccttttacttgaatcccttccgcctttaacgctcgtttcattaaatctaacgcataagtggttggctcccataacgctacccattgtctagatgaactcgctttaaccggaatggttccagtcaacgtaatcttgtttgtgccgtgagagcgcttaaaagaaattttcttttttccgccttctggcacggtttttacttgattcatgacttgagggacagaagtcttcgggatgatgtcataggtcgctttttgccctgctttctttcctggttttacttcgagaatcacggttcctgcatcataatcttgattcggtgaagctgtgagagcagagatttgtgcaccgtaatattgatcttcatcactccaaggcaaatcaatagaatatcgcgtatcatcataccaagtgtcatctgccgcaagctgtccgcgaatcgtatgtattccggcctttttcacttgtttggcaagtgctgcaaaatcctcctctaataaagtcggatccccggtaccgcgtagatacaggttgccatgtaacgttttcttttgaatagaaccatccatccagatatctgtcaggaatgtgtgtgtttctcctagtatatcaagggcgatggctgatgtgagcagtttcatattagaagcaggagtaagacgaatatcggcttgatgttcataaagaagagaggagtcagaagtattgcggacgctgacgccggagatcgcgccctctaaatcaggtgctgttcgtatgaattcatctaaagctgtcatccacggcagtgagtcgtcacgagctgtaagttgatcatcttttgctgaaaaagggagaaataaaatcgacaggatacatatttgtaaaaacaagagctgtgaaaaacgcttcacgcaatccctccttttttatcgcagccaattttagaagaatatgttcattatacacaaaagaacgtttgttctcaaaggttttttaaacagaaaagtcagctttctttgacgaaaactgacaagccctttacctcttttctggattccagccatcggttccgccaagaacagcttgcaccgtgatttgacttgcttcgtttttcgttaaaatgttggaccatttaacgcgatttgctacattgcttccggtcccagtcgatccatattctttatatcttgctgttctttcgttatcacggttatcccagttatgccatccctctgccttaatatgttcatccatttttgtatagaggaatgtcacagcggaatgaggcctccacggacgtcctaaataaaccgattgagcagctgccgtcccctttttcaacgtagaatcgatgaatacatagccatacctttgtgcttctgttgtggatgctgcagtaatatacccatttccaagactttttatttcagctcttttaaacacagctgtggctgatccaaaaataaaatcgaccgtgccctcgatatagcagttttcataatattgccggcctgagcctgttgcataaagtgtatcttgataccctaagacccgtatttgtttgaacgcagcccggtcgccagacacatacagcgcaaccgcctgaccagcatgtctgccagctgtattttgaaaggtgatattttctgcgtaaaagtcgttcgaacgaatcatagtgctggagctatttgttgtgctgccagttcttgcatttgtatcatcatacgtcagaatcgtcttgtgctggttttcgccgataaaggacacgtgcggtttattttgcggaagcaggatcttttctttatacacaccatttttaatatagatcgttacgcgctgttgattgttcgctggaatcgcatcaatggcagactgaacggttcgaaacgtgccatttcccttatgatcgaccacaaggacgcggtttgtttgattctgatgaccggctgcttgaagtgaagctgagtcaaatagtaataaagacaaaacgaatacaagccatacctttccatacttcatcgcacatctcctcctctttgtgaacattttcaatcaaacattctttttgatcctattcatgacacacaaaaaaaacacccacttaattttgttgtggatgttttttagatttttcatattttatcgcataaatcccttcattttcaatccattcacaaaatagaacgtctcgatgagaagaaatgtgctgcttttttaattgctcactcagccatgtttcgtcaaagccagcttcttgtaggtcatcttttaaaatttcgccatcaataataaatgttctaggcaatttgacttcttttcccttcacgttcacatcttctgctgtggcagttgcgtatttcattttcggaagaacactgacagagccgtctgtttccaaaatggcatattctatttcatgcaaggcaaaatgacctttcgcgcgaatcagtgtctgcagctgattgagatcaagcatatttttcttcaaacgattgtagtgaatgttccctttatcaatgacaagcgtaggtcttccttctaaaaaggctcgaatacctttaaagcgttgtgaaaaccattcaactgtatagatgagaacgccccacactgcaacagcaaacaaaatgtgctgaatcttgacttctgggtcaaaaatggcgtttccgaccatttcgcctaaaatcagtgcagaaataaaatcaaacggcgtgatttgtgcaaactgtgttttccctaataattttgtaataaaaaataaggcggaaaacccgataaatagttcaatcaaaatactaaaaaacggcacagaaattccttcctttcttgctgcatttacatacagcatatacatgaaaggaaggatctaaactatttatgagggcaataaaataaagacatcgtccccctcgaccaatgtttcatacgttttaacgcatccgtgatctggtgcttgaacgttccctgacgaaagatcaatcttccaatcatgcattggacagaagacatggtctccacttaccattccttcagccagaacaccgcctttatgagggcagcggttttcaatggctttgaactgcttattagaggtttgaaagacagctaattcaagagtaccggctgcgactgttttccctagctgcagcggaaaatctgaaagggtgccaatgtgaacttttacaactgaaactgtcatatgatctcatcccttcaattgatttatacagaagccgtcgctttttgaaataattgtttcgtgtctttttgactctcgcgcagctcctgccaaggctcctcatacgttgacagtgcgatgtccattctttggattaaggcttctcgtttctcatcatctaggagtactgattgaatatgatctaatccaagtcgttcaacccaagcagaggttctttctagataatttgccgtttctctgtaatattgaaggtacgcagctgccacttgctctacttcttctgctgtactgaccttcatcaataaatctccagcccgcaagtgtgtgccgccatttccgccggcgtacaattcaaaccctccatcaattcccacaatgccaaggtctttaatgccagattctgcacagtttctagggcaagcagagacagccattttgactttatgcggtgtcgctagaccttcgaatttcttttcaagtgcaatgccaagagccatcgagtcctgtgtgccgaaccggcaaaattgttctccaacacaagttttgaccgttcttaaagattttccgtaagcataaccagatggcatatccaggtctgcccatactttaggtaaatcttcttttttgacacctagaaggtcaatacgctggccgccagtcattttcacaagcggtatttcatatttgtcgacgacatcagctatttttctcaggtcatttgcatttgtcacgccgccgtacatccgcggaacaaccgaataggtgccatctttttgaatattggcatgcatgcgttcattcacaaatcgtgagctcttttcatctttgtactcaagaggttgaagcatgcctaaataataattcagggcaggtcggcattttgaacagccttcctctgtctcccagtcaagtacgttcatcacttctttgacatgctgcaggcccttctctttgatttcatgaatgacttcatctcgtgaacgagtggtgcaggcgcagatggtttctttttgggctgttcggttcgcatcatcgcccaacgtgtgccaaagaatctcttcgacaacgggcttgcagcctccacatgatcgtgaggcacttgtacattgcttcacttcctgaatcgttgttaagccttctttttgaatggcttccacaatctgaccctttgagacaccattacagccgcaaacgatatggtcattttccatgctttcaatcatgctttcttgcgccggatcattcgaggttaagacagataccttctccatatccgacatatctaccccttctctaatatacgagaatagacgaggtccatcgcttgtttctccaaacatgacggcacctactaatcggttttgctggaagactagtttttgatagatgcctttttgttcgtcaaagattttgatcgcttttttctcatcgttttctataaagtcaccagctgaaaacacgtcaacccccgatactttcagttgcgttgacagaacagagccttcatatggcacaggattcatgtcacatacatgcccagcaagcacattcgcttgatcgtataaaggagcgacaagcccgtacgtttgtcctctgtgttctacacattctccgacggcataaatgcctgggacactcgtttccatgaaatcattgacgataatacctcggttcacttcaaggccgcttatttctgcaagcattttacttggtttaattcctacagccatgacgactaggtctgtctcaagtgtcgtgccatctgaaaatgataacccttcaactcttgtatctcctaaaatctcatttgtctgttttcctaacaggaagttcatgccctgttcttctaatgctttttgtagaagctgacctgcaatagggtctagctggcgttccattaaatgagagctgaggtgaatgacattcacttccatgcctaagttgagtaggccgcgtgctgcttccagtccaagaaggccgcctccaatgactgctgcttttttgtacctgctagaggcattgaccatttcctctgtgtcttgcaatgtacgaaaggccgtcacgccttttttatcacgccctggaatcggcaggataaacggaagtgaccctgttgctaaaatcaatcggtcataatgcacggtccgtccttgatcactggtgactgtttggttatctgtatcgatcttcacaatggtctcatttgtaaacaactgaatatcatgctcctgataccaattccaatcgtttagtgtaatatcttcaaccttcgtatctccttgaagcaccttcgataaaagaatccggttatagttaggatgcggttcacttccaaataccgtcatgtcgaatcgttcgctgtctgtttttaaaatgttttcgaggcttcgaatgccagccataccgttccccactaatacgagtttttctttcacgataaaacacccctcatgtgatcatttttagaaagtaccatcatctaaacatagatggaaaatacatgttatgatttctcacatattttttaattcacataggctgacagctctacaggacaatatttaaagcctggcattttactgtgcggatctagttgttcactaattaattgattaatggattgatgtttactccagtgaaatggaacaaacacggtatcttttcgaatggtgtctgatatgcggcatctcatgatgacacttcctctttttgactggatggtcacaagctccccgtgctgaagtccatacgtttttgctgtgtcaggatgaagctctgcataagattcaaactgccgggcaacaagagaggtactttttcttgtttgaacgcccgtttggtagtgagccatcactctgcccgtcgttaaataaagaggatattcttgactgactggttcctttgccacattttttccgtgtgtgacgacggcaaactttgctaaactgtcagaatgtgagaatgcatgttcaaataatctttcggttcctgggtcttctagatgcgtacaaggccataatatgccttgctccttcctcagtctttcataggtcatgcctgagtaatccgcttttgcgcctttcgttgcggctcttaattcttcaaaaatctcttctgcggatgaaaaggagaaatagccgcttttgcctaatacagctgctatatcacaaatgatttgccaatcgtgttttctttgatgcttaagtggataggttgcttctctaagcgtaacgcgcccctctacatttgtcaccgtaccttcatcctctaaatatgacgaagtaggtaaaattacatctgccagcgcagctgtctctgacataaataaatcaacagctacaaaaaaggacaatttcttgatggcttgttgaataaagcgcgcgtgcgggcctgactgaacggggttagagcacattaaaaagagcgcttttatctctccttcctgcattttttcaaacatctcaaaagcagacacgccttttccagggagttctttttcatctatgttccatatgtcagctatttcttttctgtgagcagaatttgtgatatctcgataccctggaagctgatctgctttttgtccatgctctcttgccccctggccatttccttgcccggttattgcgccatagccgcacccaacgcggccgatcttcccagtaacaagcagaatattcaggaaatttcgcacagatgctgtcccgtctatttgctgctcaatgcctcttgctgtgaaaatcatgcctgtcttttcttgtgcgaatttccttgctattttctgcagaacttcaatcatcacaccggtttgctcagcaatgtttgagagggacatgcgcgagacgtgctcctttaatttttggaaccctgacgttcgatgacgaataaatgattcatctattaaatgttcatgaagcataatgtgcaagatgccgtttgccagtgcagcatctgatcctggtttcaggctgacatgtaaatcggctaattgggctgtcggtgttttgcgcggatcgatgacgatgagaaatgcaccgttttttttcgcctcttcgacgtacggcatgaaggttggctgacattctgctatattcgttccaaccaatatcaatacccgtgtatgcttgatgtcactgagaggaaacgtaagaccccggtcaagtccgaatgtttgattcgccgcagttgctgctgacgacatacaaagtctcccgttgtaatcgatgtatttcgttttcagcgccactctcgcaaactttccgagtaagtacgcctcctcatttgtaatagatgcgcttccgtacacactgatggcatcatgcccgtgtgccatctgaagggattccatgtttgttttgatttcattaagtgcctcctgccatgacgcttttacaaattgcccgtttcttttgatgagcgggtgattcaaacgttctttgtgcagtgcgtgctggtgtgcatgctgcccttttatacaaagtctcccgtgcgtagttggattgtgtacgccaatcgtttgatatctggttcgtccttccacatgctgctctactagctgcattttgcactgcatactgcaaaatggacattgggatggatacactcgctttcgttcttcctgctctgatatttgctgggcatatcgtaaaaaagactgactcataccttcacatccttttgtctgctttggtcaaattgttcacagagctcttttctactttcctcatcaagcaatttttctcgaatagaaatgagtccataacggagaagccaatcgccgatggattcttgaaagtatgcactttttctataatcttcaagcaacgcttttaaaaaagggatcagctcacttgattgaggcaaagtgtaaaaaagctggccggccttcggctgacatacgtcacctcctatataaatgttccattcccccagctgtctcttcatacaaatgtcatatattggagctagtttacacgtgcaggaagagccggcgacatgaatagaggtgacggctggtaaaagtgtgtcttctacttgtctttcaaactccattactagtgctgtgacagctggatcgtgactacaatcacatgtaaggacatgagatagtcttcttttttctttcgccatgatgggccaatgttttttgacgatctgtgccgcctgttttgacacgccgatgagccgtattcgtttatgctctgtcagctctgcctgatcaatcagtttttgttctaacaaagacgtcatgattttcaggaaatccagttcaagacgccctccgtatagctgaggcaacatgtcttcttgatcagcatcgctgattttttcaatcggtgattggaattgctcgagatagtatggaatggcagacctgcagttgctgcagccgttctccgttttccaatgaaaatgtcttctgatttcctccacattcagcagcagttgctttttgataaacgaaaaaatggtctgctcatcagcttctgtacatgaacaaaaagaggccggctcatctatttgttcatgtgatgataactgacagtaggcacggacgagctcttgacagccgccgcagccggttgctgcccctgtttgtttttgaacctcttctaagcttgtcagctgatggacggatatggtgttcaaaatcgtcccttttgtaacgctttgacattggcagacgagatcgtccatttttaatgaatctagaggagatggctgctcctcatgaagagctttcatgacgacacttttatcacgccccactttcacatcttgcaaaagctgatcggctttctccagctctccaactaataaaaaacctgttagtgcctcgcgttcaaagacgaattttttatacacttcttgctcttcatctaaatatgtcaccactgacgtatacggggaatggagttcaatacatcccgcagaatagataggcatgtcaggtacttttaattttgttgagtaaatgggatgaggtacagaagtaatttgctcgcctaatagatgattggcaagtgcatttgcttgttcataaatgggctgaacaaggccatgcaccattcctttatgctctgcacattccccaatggcataaatatcttggacatttgtttgcatcatgtcattgacgacaatggcttttcgcgtatgaatgccgtgattttttgcaagctgtatgtttggacggatacctgttgtgaaaacaacaagatcagcatccacgatgtcgccatttttcaatagaacgccttctaccctctcgtcccctaagcatgcaatggtatgggcatttgttttcacctggatgcccttgcgcgttaattgctgctgtaatagactagcagccgtttcatctaattggcactgcatgagccactcggcatgatgaatgatggttgtctcaagtcccgcaatctgcaggccagccgccacctctacaccaagcacaccgcctccgaccactgctgctcgttgataacgcatcgcatccgcacaaatggcctcataatcatcaattgtacgaaaagcataaatcccttttttggacacgccctgaattggaagaaaatacggcaatgatcctgttgcgatgacgagcttgtcataggaaatttcccggcgcgcttctgtcatgatacacttcttgtttgtatcgatttggacgactgtttcccctttgtacatgatgatgtcatgcgcggtgtaccattctttttccttgagttcaatttgagataatgagtcgcttttttgtaaaatcgatgaaagttttattcgattgtaggcagggcgcttctcttttccaataactgttatggcatagtgttctggctgtttttgaatcatctgctcgatacatttcatactcgccatgccgtttccgataaacacgagtttgcgttttgccatatgaaatcaacctctctaagcatcttgcccaacacattgtatggatagattatggcacatgcctgtaaaaaagtgtgtaatcatgtcaatttttctaacatgatacttttattacttaggataactcgctatctttaagtcagaaaattcaaaatagaggaggcattttatgaaactctcagagttaaaatcaagtggtcaccctaagacattgctaagttcctttttatatttcgatgtgagctttatgatctgggtcttattaggggcactgggtgcttttattgcgcaagactttgctttatcgaccgcagagaaaggcatgattgttgccattccgattttatctggttctttttttcggattgtacttggcttattcactgatcgtataggacctaagaagacagcggtaattggcatgcttttcaccaccatcccgctcatctgggggttcatcgctggtacaaccctttccgagctcgtgctgattggtattttgttaggagtagcaggagcaagctttgctgttgctttgccaatggcaagccggtggtatcctcctcatttacaaggcgtggccatggggattgcaggtgccggtaacagcggaacactgatctccacactatttggtccacgtcttgccgagatttatggatggcatgcagtcatggggctcgccctgattccgttaagtcttgtctttttgttttttattttcacagcaaaagatgcaccaaatcagcccgctccaaagccgctacggtcgtatttttcagtatttcaggtgaaatcggcatggtttttctgcctgctttatgcgattacattcggaggatttgtcgggctttccagttttctcagtattttctttgtggatcaatatggtatctcgaaaattcatgcaggtgattttgtgactctttgtgtggcggcgggcagcttctttcgccccatcggtggtctcattgcggataaaataggtggaatgaaagtactgcttggattattcgcagtcatcggcatctgcttaggaggggtgagcagtcttccagctttacctttggtcattacccttttatttaccgggatgatgtgtcttgggatggggaatggcgcagtttttcagctggtgcctcaagtatttcataaagaaattgggatcgtgaccggaattgttggtgctgctgggggcattggcggcttctttttacctaatattctgggcagtttaaaagaagtgacgggctcatatatgtttggctttttgaccatttctctttttgttctagttgtctttatttgtttagtcatatcgcagcttaaacgcaaaaaagtcatcatcaaccacaccatttctgaatcataaaaagccatgaccactctttggccatggcttttctttatatgtgtaaacaccctttgtatgacctattttggcagaaccgaactccccattaaataacggtctacctcgtgcgccacttgtctgccttcattaatcgcccagacaatcaagctttgcccgcgtcttgcatctcccgctgcaaatacgccttctacatttgttgtatactccccatactttgcgtcaatgcgattgtttttgctgtccacgccaaagtgtttcacgagtggctgttcagttccctcaaaaccaattgcaataaagactagctgagcaggccataccttttctgtccctggaatctcatgaaattcaaacttcccctgttcgtttttcatcttttccatttgaatggtatgaagctcttttaatttcccatttttgtctgccacaatttttgtggtttgaatggaatattgacgcggatcttctccgaattttgcttgtgcttcttcataagcataatccagtgagaagacgtaaggctgttcaggccacatgttatcccctacacgtgtatccggaagttttgggtgcttcccgaactgaacaacactttttgctttttggcgaagtgcagttgcgacgcaatccgcacctgtatctcccccgccaatgacaatgacgtcttttccttttgcatcaatgaagtttttgtctttaaatcctgaatcaagcatgctttttgttgcgagggttaaataatccatcgcaaggtgaatccctttagcttcccggccttcaatcaacaggtcacgctgcttctgtgcacctgtacaaaggatgaccgcatcaaactgttctttcagttcgtcggcagtgacatcgacgccgatttctgtgttcgttacaaaatcaatgccttcttgtctcaacagtttgactcttcgctccaccacttctttgtccagcttcatgtttggaatgccgtatgtcagcagcccgccaaggcggtcagaccgttcgaacactgttacggcgtggcctgcttggtttaattgatccgcacttgcaagtcctgctggccctgagccgacaatggcaatcttcttgcctgtacggcttgaaggaattcttggtgtgatccatccattttcaaagcctttatcaatgatcgtgcgttcgatatttttaatcgaaacggctggatcattgatggcaactgtacatgacccttcgcaaggtgctggacatactctcccagtaaattcagggaaattatttgttttttgcagcctttcgagcgcttctttccatctcccgcggtacacaaggtcattccattctggaattaaattgtagatcggacagcctgagacgccgcccctgatctccatcccaatttgacaaaacggtgtgccgcaatccatacatctagcgccctgcttcttcaatacgtcatctgtataaggagctgaatattctttccagtcattttgacgagtgagagggtcacgttcatttggcttttctcttttataatccataaaacctgttgctttgcccattgtcctctcccctttcttaatgagcgagggctgctttttgcccgtttgccgtttcttgatttttcggttttgtgtttgcttcaaaggcgaacatgaccgcttcttcatgactgaggcccgcttgtttttgttcttcaatgctttgaagcatcattttgtaatttctcggaataactttgatgaattgatccttttcttgcgcccagttttctagaagtgccgatgcttttgagctgtttgtataatgaaggtgctctttaatcagctgtttcacttcttgttcttcttcatgatctgtgagcttttcaaacatgatcatttccatgttgcacattcttttgaactgtttcgcatcggatgtatggacgtaagctacgccgccagacatgcctgcgccgaagttttttccgacgtctcctaaaatgacgacacgtccgccagtcatgtattcacagccgtgatcaccgattccttcaacgaccacatgcacacctgaattacgaacggcaaagcgctcacctgcacgaccgttaataaaggcttttccgcttgtcgctccgtagaatgcgacgtttccgacaatgacgttttcatgtccattttgtacaaagtgatcagaggttttgaccgcaattttgcctccagagagtcctttgccgatatagtcatttgaatcacctgttaaatagagagacatgccctttggcacaaatgcgccgaagctttgtcctgcggaaccagtgaaccttagtgtgatcgtatcctctggcaagccttcttccccgtagcgcttagacacttcacttccagtaatggttccggccacacggttgatattgcgaatattcaatgatagatcaaccggtgtttgatgattcagcgcttcctgtacataagggaggatttcattcatatccagtgattcatcaattttatgattttgcggtgttctgaatgtacgagctccttctggctgataaagcagtgtttcaaggtctagctgccctgctttccagtgtgcttttgctcgttcactgactcctagaacttccgtgcgtccaattaattcatccattgatgtaaagccaagttccgctaagatttctcttacttcctctgcaataaacatcatgaaattcacaatgtgatcagggttccccatgaattttttgcgaagctctggattctgtgtagcgacgccgactgggcaagtatctaaatgacatgctctcatcatcacacagcccaatacgacaagtggagctgttgcaaagccgtattcttctgctcctaaaatcgcagccatgacaacatcgcgtccagtcattaacttgccgtccgtttcaagaacgactctctcgcgaagaccatttaacacaagggtttgatgtgcttctgccaaaccgagctcccaaggaagtcctgtgtgtttaatactcgttttcggcgaagctcctgtgccgccatcgtatccactgatcacaatgacatccgccgtcccttttgctacacctgctgcaatcgtcccaacgccggctttagacacaagcttgacgctgatgcgggcatcacggttcgcgtttttcaaatcatggatcagctgcgccaaatcctcgatggaataaatatcatgatgcggcggtggtgaaatcaatccgacgcctggtgtagagccgcgtacatcggcaacccaagggtatactttatttcctggcagctgtccgccttctccaggttttgctccctgcgccattttaatttggagttcatctgcattgaccaaataatgactctttacgccaaagcggccggaagcaatttgtttaatcgcacttctgcgatcatcgccgcgttcatcaactgtaaagcgtgcaggatcttctccgccttctccgctgttacttttaccgccaattcggttcatggcaatcgcaagcgcttcgtgcgcttctttacttaaagatccaaatgacatggcacctgtcttgaatcggcgcacgatggattcagcagattcaacgtcttccagacgaactggcttttgttttggctggaaagaaaataaatttctgaggaagccgattctttcttcgtccgctgcctttgtatattgcttaaatagatcgtaatcttcattgcggcatgcccactgaagcgtatggatcgtttttgggttaaaggcatggtgctctccattttttctccactggaaatcactgcctgattcgagtgtttggtcagtcgctgcctgataccctgcttcatgacggagttttgcctcgtgtgcaatggtctcaagatcaatcccgccaagctgagaagctgttcccgtgaaatacgcctgaatgacatcttcactaatgccgacagcttcaaagatttgcgctcctctatagctttgcacagtggaaattcccactttagacatgactttgacgacaccttcggtcacgcttttaccaaactttgtgactgcttcatcaaagctgaaagagatcgcttcatctgcaatcaactgtttgtacgtttcatacacaagataaggatggatcgcatctgctccgtagccaatcagtgcggcaaaatgatggacctctctgacttctccagattcaacgatcagactaacctttgtccgtaagccttggcgtacaagatgctgatgcagtgcactgagcgctagaagcggtggaatcggcactttttgttctgtcatttcacgatctgaaaggattaataaagatacgccttcgcggatcgctttttccgcctcttcaaacatcgcatccaatccgcgctttaaatcatcggtgaatagagtatgaatcgttttgcttttaaaggcattatgaacaatcgttttcaagccgttaaattgtccactcgttaagaccggtgtataaagtttaattcttcggcatgaatattcattcggatgtaaaatatctccttcagcacctaaccaagtcatggtagatgtcacaagctgctcacgaatagcatcaatcggcgggttcgtcacctgtgcaaacaactgcttgaaataatgaaacagagactgcgcacgatctgataacacagcaagcggtgtgtcgcttcccattgaaccgattgggtctttaccttcttctagtaaaggaattaaatatttttgaatgtcttcgtacgtataatggaacgcacgctgacgagtcaataaatcatccattatactagaattttctgaattttcttctgagcgattgacatgaaccatttcttcatcaagccatttttgataaggaagttcattcgcaatcgtcgatttcacttcttcgtcagaaataattcgtccttcttctaaatcgattaacagcattttgcccggctcgagacggtctttgtatttgacatcctcttcatttgtgtcgatcacgccgacctcagaagagaaaatgatatgatcatcatttgtgacgtaatatcttgccggtcttaatccgtttcggtctaagatggcaccgatttgtttaccatctgtaaaggaaatggctgttggtccatcccacggctccatgagagagctatggtattcataaaatgcccgtttctctttcggcatgtgcgtgttttcagtccaaggctctggaatcagcatcatcgctgtatgagcaggtgtacggcctgcaagcacaaagaattcaaaggcattgtctagaatggatgaatcacttccgtctgcattcagcactggcaaaatcttgtctaaatcgtctccgaaagcttcagatacgaattgttgttctcttgctctcatccaattgatgtttcctcttaatgtgttgatttcaccgttgtgaatcaagtaacggtttggatgggctctttcccatgtaggaaatgtatttgtactaaatcgtgaatgaacaagtgaaaatgcagaaacaaatgtttcatcctgaagatcaagataaaaagcatcgacttgatctgatgttaaaagccccttgtatacaatggtttgactcgacaagctgacaaagtaaaattgcttttcctctgctgttccccagttctcagcctgcttacgaatgacatataattttctttcaaatgacaaacgatctgtgatgttgtcgtttgccccaataaagacttgcctcacaaccggacagctcttcgctgcgacagtaccaattttaccggcatcgacagggactgttctccagccaattaatgtttgaccttcttgtttaatgaatccgttgattttttgctcgatggcttgacgcgttttctcgtcatcctcttttgaaaagaagaccattcctaccccgtaacggcccttttcaggaagtgcaaagtctttgcagttctttctaaagaaagcgtctggcagctgtaccattaagccggcaccatcacctgtatacggatcactgccttgcccgccgcggtgatcaagctggcacagcatttgtaatccctttttgacgatgctgtgtgtcgcttccccttttaaatgagcatacagtccgattccacatgcatcatgttcaaattcaggacggtagagaccttgtggttgtggtagttgattataagtcatcgtttctctcccccgtttaaaagatccgttttttcacagtcataaaatctcacaaactctgtaacttattttaagttttcaaattaatataaacaatatataatttagatcaaaacaatctctttttgagatagatgggtgtgaagtgtaaaaatggagcttcgtcagttacgttattttgtagaagtcgcagaccgtgagcacgtgtcagaagcggctgaaaacttacatgtcgcccaatctgctatcagccggcagattgcgaatttagaagaagaacttggagtggccttattcgaacgagaaggccgaaatatcaaattaacgaagatcggcagacaatttttagatcatgtcagaacggcactaaaagccattgattatgcgaaagagcaaattgatgaatacttagatccgcacaaaggaacggtgaatatcggctttcctacaagtctagcaagccaagtgcttccatctgtcatttccgcctttaagcaggaatatccagaggtcgattttttacttcgtcaaggatcctataaatttcttattgaagctgtaaaaaatcgagatattgatctcgcctttttaggacccgtaccgacaaacgatcctcaaatagaaggaaatattttgttttcagaaagcatttatgcccttttgccggttagccacccctttagcggacaaaagagtattcatttaagtgatttaagaaaggatcatttcgtgttatttcctgaagggtatgtgctgagacaaattgcagttgatgcttgcaagcaggcaggctataagccaaccatttcatctgaaggagaggatttagacgccattaaaggtcttgtatcagcgggtatgggcgttaccttattacccgaaagcgccttttatgaaaccacaccgcgatttacagcgaaaattccgatcgattttccgcaagtgagaagaacggttggaattattgcgtctaagtcacgagaaatgtcaccttctgctcatgatttttatgtgttcgtgaaggatttcttttctaaaattgaacaatataaataatttattaaaacaggacatttcatttgtggaaataatccctctttgtatatgatgggttacagaacaacacactttatggaagaaaggtattcgtatgaaatcaattttatcgtttttaaagccgtatcggctgtccgttgtgtccattgttatcctcacctttttaagcagcatgctccagctgtatttaccgacgcttacggcagatatcgtcgatgtcgggatcgtccaaggagatattgcttacatatggaaggttggcggctggatggtggcctgttctttacttgccatcttgctcacgatctggaagtcctacttgtcatcaaagactgcacttggcttcgggcgtgatatgagaagacagctgtttgtgcatgtcgaacaattttcactagaagaatttcaaaggatcgggacgtcttcctttattacaagatcaacaaatgatgtgaaacaagtccaagatgtcacgatcatgatcttacaaatgatgacgagagcaccgctcatgcttgtgggcggaattattttggctgtatcccgagatgctgtcctgtctctcatctttttagcagctcttccccttcttggcggatttatctatttggtatcgagaaaagccattccattattcggccagcttcagaagaaaacagaccggctgaatttaattatgcgagaatctctttcaggcatccgggtcattcgtgcttttaaccgtgtagatgatgaaaaggagcgttttcaagaagccaacacatcctacaaggatactggccttagagtcaaccgattaatggcttacttgtttccatttatgctgatcatcatgaacttcacgaatatcggtattgtctggctaggtgcaaatcgaattgatgccggagagatggaagttgggaatctcattgctttcattcaatatgcgatgatgattttaatggcacttattatgctgtcgatgagctttattatggttccaagagcacaagcatcagctaaacgcatgaacgaagtgttaaacatggaaccgaagattaaagacaatgaaggaactgttactgacctgcgcgcgccagcccaatccattcgttttgaggatgtgtcattttattactcaaatgctgagaaaccggcagttcaagacattacgtttgaagccaaaactggcgaaacgacagctattatcggaagtacaggttcagggaaaaccacccttctccagctgatgacacgcttttatgaagcaacagatggccggattacactagatggtgtagacattagagagctgcctcaggagaaactaagaagccagatgggctatgtctctcaaaaagcggttttatttagcggcaccattgccgataatgtgcgttttggcaggcaggatgcaagcgatgaagacgtctggcaggcgctgcgaacggcgcaggcagaagaatttgttttgcaaaaagatggcggaatcaatgcggaaattgaccagggtggatcgaatctatctggcggtcaaaagcagcgtctttctattgcaagagcgctagtgagaaagccgtcattttatctgtttgacgatagtttctcagcacttgattacaaaacagatgcgaagcttcgggcatcattagaagccgaaaaaacacatgcagccctcatcattgtggcgcaaagaatcagcacagtgaagcatagtgataaaatcatcgtactagatgatgggaaaatcgcaggtatcggaacacatgaacaattactgaaggacaatcttgtctatcaagagattgttgcatcccaggaaggtcaggaggtggagcgaggatgagtaataaaatgtcttccggcatgggccataaaggcggccaccctagaggacctgtcgcaaaaccgaaggaatttaagaaaacactgcttcgtttgattggttatttaaaaccgaggaaaattcaattgatcattgtcttcattgcagcgatcggttcaaccgtctttaacgtcattagtccaaagctgctaggggatgccacctcttccctgtttgacagctttactcaaggaacagctgttcaatttgatgtcatttcacgtattttattactgcttgtcgcgctatatgtcattgcctctctcttttcattcgttcagcaatatgtgatggcgggtgtctcccaacagaccattgctgaattacggcaagaagcaaatgacaagctcacacgtctcccccttcggtattttgataaaacaacccatggggacacgctgagccgtgtgatgaatgatatcgataatattaatacatcgcttcagcaggcactcacccaagtgattacatctgtcattacggtcattgggattgtcgtcatgatgctattgattagtccgctgcttaccttgcttgtttgtttaacgctgccgctcagcctgtttgcgattcgcggcatcacgtcattttctcaaaagcattttaaagcgcagcaaaaagagctcgggatgatcaacggacatattaatgaaatgttctcagggcatcaaacggttcgagcgtatggctacgaaaagaaagcgattgatacatttgatcaattaaacgaacagctgtatgaatcatcgaggaaagcgcagttcatttctggtttaatgatgccactgatgacgtttatcgggaaccttggctatgtggcagtcagtgtagccggcggtattcttgtcattaatgggaatattcgtgtcggagatgtgcaggcgtttatccaatacacgcagcaaatgtctcaaccgctcgtgcaagcatcaagcgtcgccaacttggttcaatcagcgattgcttctgctgaaagggtatttgaaatcctggatgaggaagaagaaagtgcggaggaagatgcagcaattgatcttgaatcactttcaggcgatgtgagctttgaacaagttcaatttggatatgaaaaagaccatccgattattaaagatttgactttagatgtgcaagaaggtcaaacggttgctattgtcggaccaacaggcgctggaaaaacaaccatcatcaatcttttaatgcgtttctatgaattagatcaaggctctatccgcatcggcggcgtcaaaacaactgacctcagccgtcagcaagtacgcgacttatttgcgatggttcttcaggatacgtggctttttgaaggaacgattcacgacaatattgcctatggcaggcagaacgtctcaaaagaggatgtcatcaaagccgccaaacatgcttatgctgatgacttcatccgcacactaccagacggatatgacacactcttaacagaagatgccggcaatctgtcccaaggtcagcgccagctgttaaccatcgcccgtgcgattttatctgatccaaagatcttgatattagatgaagcgacgagcagtgtggatacacggacagagatgcacattcaaaaagcgatgaatgaattgatgaaaggcagaacgagcttcgtcattgcacacaggctgtcgacgatcaaggatgcagaccttattctagtcatgaaagatggcaccatcattgaaaaaggaacgcacagtgaactcttgaaacaaaaaggcttttatgcagacttatatatgagccaattttcggagaatcaagtgggttaaatataaagagaggatagacacgcgctcatgcggtctatcctcttttttgttaatcagctcgctttttcacttttacactgagtttcgttatatactctgcttcatctttagacatgagtgaatgaagcaaatactcctcaaatacatctccatccagcatcatttcctctttctcgatttcatctaacaagcgcgaataagcagattcaatctcctcatatgatccttgatcatacatcaccgcatagaggccggcaggttttttaactgctcccggcgcttccattcggcaaaacagccgatctgactgatgatagtgacgctgaagaaactgctccttttttaagacagcaccatttgccgcagcaccttttataccaattccctttagaaattttccaacaatacgtgatatttcttctacggatgtattcatgtcaattgggttcgatgcacttaatacaacaggttcttctggcatctcttgaaactgaacctcccctatttttatagatgatagttcttgcgtcgtctccatcacccgcataagaaaagactggatatcttgaagtttttcaatctcttgtttgaccttttctatttgttcggctgctaggctttgaagcctttcgcgggaaggctctgtaaaatattgttttaactcttttatcggaaattgaacagctcgaagggattgaatcgctataaaatgatcaaattgctcgagtgtatagtaacggtacccattttcatggacaccagctggcttaaataaatcaattttatcgtaataaaacagggtatctttttttacatcaaatagcttggcaaattctccagtgaaaaacgttttttgcacatcattgatcatgattaaggctcctctcttgactatggagttactccaccctttatcatgataacatgcagaaccaccactacgctgggaaaggataaaaatatgaacaacataactcaacatgaagtgacattagcacatgcaaataaagaggatttcccttttatgaaaaaagagctgcagaaagcttttacagctggcgtgatcgacgcatttggcgatgcgcatgatggaccgattcctccagatgaagtgattgatgaatcttttcaatcaaatgaacacattgtttatcatattatgctaaatggtgaaaaggcaggcggcgttgtcatcaaaatcaatcaagagacacagcgcaactcagttgacctgttatacatctcttcatcctcacacggaaaaggcattggtcaggcagcatggaaagccatcgaggcgcaatatccagaaacgattgtttgggaggttgtgaccccctattttgaaaaacgcaacattcatttttatgtcaataagtgcggctttcaaattgttgaattttatcacatgaaacatccagatccgaacgcacctcatgcagatgatcaagaaaatgagctttcagcacctgaggaatttgaattctttaaatttgagaaagtcatgaagaaaacttgctctagcaaatgaaaatcttcatcatacactaaaaaacactaccccataaaaaaggtagtgttttttgcatctcttctagcctctaatctggccatcgccagatagaagcagcttcgttgtcgtgagtgcaggaagtcccattggacctcttgcatgcagtttttgagtggagatgccaatttcagccccatacccaagtgcgccgccgtctgtaaagcgggtagatgcgttatgataaaccgccgccgcatcgactgcgtttaaaaacgtgagtgcctgcttttcatcttctgtcacgatggcttctgaatgttttgtaccgtactgatcaatatggtgtatggcttcctcgattgaatcgactacctttactgcaagatcaagacttaaatactcatctgtccagtccacttcctcagcaggaatggcgtttgaaaaatgagaaattgctgcctcgtcaccatgtacggtgacatggtgctccagcagagcttcattcaatgatgcagcattctctttcagccaatcgcgatggatgatcagcgtctcaagtgcattacatacagccggacgattcgtttttgcattgatgacaatctcaatggctttttttacattggctgtttgatcaataaagacatggcagtttcctgtccctgtttcaaggacgggaatggtggattgttcaaccactgttttgattaaagaagctccccctcgcggaattaagacatcgatccattcttttagatggaacatcgcttgaaccgatgaacggtctgtttgttcaatcaattgcaccgcatcacgcggaatctttgtttgatctaatgtttcatgaatgacacggacaatggctttgttggaagaaatagcggaggaaccgccttttaaaatcactgcgttgcctgccttgagggcaagccctgctgcatcgacagtgacgttcggtctcgcttcatagatcatcccgatcacgccgagcggtactcttcggcttttcacgtgcaagccgttttcaagagtccattcatccaatatttctccaacaggatctgttaatctcgtcacaagccgtaagctttccgcaaactcatgaattctttcttcatttaacattaaacgatccaagagtgcctctgagaagcccttttccttcccggcatctacatccttttggttctcctgtaaaatgaaggtgcttttttgttctaacgcttctgctagtttaagcagcgcctcgtttttatcctctgtatgaagtaaacctagtttttttgaaacgtgctttgctttttttgctttttctttgaccgatgtgacaacttcagctgtcagtgtcatggaattcctcccttttggttagcaaactggtatcgataattctaaatgacaaacaaacgcttcaagatcgacgacatgaaccacttcatcctgtaacgagtcactgctcagtgcaagttcgtcagctgggtaattcacaataccaagccctatttctctaccatcttgatctaaaatacggacgacatcgccttttttaaacgaaccctttacattgacaatgccatcggaatcaaggcttttctcgcggtgcatgaggtgctcctgtgattttttttgaacaacgatctcgccttttggtccagaatgaaaggcaatccactgcttcttgtaattcagcggagctaaattttcatcagccgtaaaataagtgccgtcctctgtcccattgatcgctttatctaaaatgtgaggcgtatccgcttttcctaaaaagccattgatgccagcggccatggaaattttaaacgcatcgagctttgatttcattccgcctgtgcccacactgctgcctgcatctccagccgctgcttcgatgtcttctgtgatgtctgtgacttcaagaattctctttgcatttgggtttgtatgcgggttatcttcatacaagccatcaatatcagataaaatggcaaggaaatccgcatcaatcaatccagctacttttgcagacaatgtatcgttatctccgaacttcagccgattgatcgtcactgtgtcattttcattaataattgggatgatgcctcgatctaataacacattcatcgtgttgcgtacattttgatagcgcgtttcatctgaaaaatcacttcttgtgattaaaagctgtgaggcaatataaccgtgtgataaaaataaagtagaatatgattccattaaaaggccttgcccaattgaggcagatgcctgtttttccggcagtgttttgggtctatcgataaatcctagttttcggtaaccagctgcaaccgcaccagatgaaaccaaaatgacttcgtgtcctgcatctttgagtttcacaatttgattgacgaggttttctagtttttttaaactaatctccccttgaaagctagtaagcgagctgcttccgattttcacaacaattcgttttctctctttatctgcgtacaccttatcactcctgtacctgagctctatttatatagatactttttgtttttgctgattgctgatctcttttgatcgattagcagcatgtttgacggcctgcttgatcgcttctccaccgccaaaatcatctaatgcattcaatccagcagccgttgttccatttggtgacgtaattttctctcttagagtagaagggtcttcttctgtttcttgcagcattttcgcagcaccgagaagtgtctgcgcgccaatttgacgagacaattccttagataaacctgcttcttctcctgcttcttcgattctctccattaagaaataaaaataggctgggccgcttccggcaattccagtgaaaatatccatttgctcttcctgaatggtatagacttcgcccatttcagataaaagagcctgactcatgctgatatggtcgtctttcacataacgtccagcacataaagcggtcgctgaagccccaatcgtacttgacgtattgggcatcaccctcataacaggctgcccttcatgcagcatattttcaatatatgattgcttaacgcctgcaaggacagacatgatcagctggtctctctgaatatgaggttttaacgattcaagtgctgtttcagcatcctttggcttcatggccaggatcaacatatccatttcttcaaaaggaaaagaatccattgtggctgtttgtattccgtatcgtttcgttagttcattcaatcgatgttgattttgtctgtttgttgcgtaaatttggcctagcggcatctgtcctgatcgcacaatccctgcaatcattccttccgccatagagcctgctccaatgaaagcaactttcttttgatcaatgatatggatcctctcccttgttcgctttttgttcgtgtttttcacacgttagttatcgtaacatgatgagaaatcgtgtcaagaaagagctagtgcttttcaaaagtcccgattgtatagcgaaccgcttgctatatgtatgctgactgcgcttttacgaaacaacaatttagatcaaaagaactattctaattagcatcatagtaccctttctttcgactgaattccccattttatttttgattcggtgacttcaattctattttttagaaagcgctatcatttttaatgactttctattttcctatacgatgaatgtgcttgaatcttccgattagactattgacatattttagaaaacatgtccgttgaaatgacattttactggtgatacggtgaaagagaaaccaagtgaaaaaggagcgttcataatgaaagtgaaagaaaactatgtcaatgtcattccaatgaaagaaatccgttctaccgatgaccttcttttcccattccctatttacaatgagctacgtgcgcagagtgatatgagatatgatgagacaagaaagtgctgggatctctttcgatatgcggatatccaatctgttctcaagcagccgaaagtgttctcctcacagcgaggaagaagcacctcgaaaacgagtattttaacaatggaccctccaaaacatacaaagatgagagcactcgtgaataaagcattcacgccaaaagcgatcaagaaattagaaggtaagattaaagacctgacacatgacctgctgcaacaagtcaaggatcaacgtacgtttgatatcgtgcaagatctagcagctccccttcctgtgatgattattgctgagcttctcggtgcagaggtaaaagatagagatctgattaagaaacattctgatgccctagtggcaggtgctaaggatgaatcaaaagaagccattcaggcagttgtcgatatgcagaaacgcgcagaggaagagctgtccgcttattttgctcacttaatccaaaaacgaaaagaatcccctgctgatgacctgatctcacttctcattcaagcggaaatcgatggtgagcgtttaaccgagaatgaactgcttggcttttgtattctattacttgttgctggtaatgagacaacgaccaatttaattacaaatgcagtacgactgcttacagagcagccgcatatcgccgaagcagtacggcaggacccctctcttattcctcaattgaccgaggaaacattacgctattacccacctgttcaagccattgggcgaatcgcggccgaggatgtggagattgcaggctcaaaaattgaaaaaggtgactatctcattagctgggtcgcttctgcaaatcgcgatgaacagaaatttgacgatccagatacgttccgccttgaccggaaatcaaatccgcatatgagctttggctttggcattcatttttgtctcggtgcaccgcttgcccgccttgagagcaacattgcccttgaggttttactccagacgtttcaagacatcacctgtgcggcagatcagctaaaacccattcaaagcacatttgtttttggggtaaaagaatttcctgtacaggtcacccgtttttaaaagtcccttttgagggactttttcattttcttcaattcatcatctctttcttaccttccatctccgaacatgctaaaataaagtccatacaaagtgataacggaatgcagaaagggagccaaaattcatgaccgattatacagcaatgaaagacggaatattcaaatcagtttgttcgttagattgcccggatcagtgcggtcttttgatacataaagaaaatggaaagatcgtaaaagtgcagggagatccagaccacccagttacccaaggcaacatatgcaacaaggtgcggaatgtcacagcccgtttatatgatgaaaaacgactgaccactcctttgaaacgtgttggacgcaaaggcgatggtcaatttgcaccgattacgtgggaagaagccattgaaaccattcgtcaaaaatggacaaagctgattgaagaaaaaggtccagaaagtattctgccttacagcttttatgggaacatgggcaatctgaatgcagaaggcatggaccgccgctttttctatcgtcttggttcaagtcagttagaccggaccatctgtcagtcagcaggaacgactggctataaatatacaatgggtgcaagcatcgggacagacccagaagacaccattcatacgaaactatttatcttttggggcatcaatgctgtgtcgaccaatatgcaccaaatcaccctcgcacaaaaagcgcgaaagcaaggagcaaagattgtcgtgattgatgttcacaagaaccaaaccggacggatggcagattggtttattccgcttcgacctggtactgacagcgcacttgcccttggcatcatgcatgtcctttttaaagaaggactgacagatgaagcctttttagaggaatatacaaccggtcataaagagctgcgtgagcatgtgaagcagtatgatccagataccgttgagggtatcactggggtttctaaagaggacatccttacacttgcgagaatgtacgcagagacatcgccatctctcattcgcattggcaatggtttgcagcaccatgataatggcgggatgagtattcgaaccatttcctgcctccctgccctgactggtcaatggctctacaagggcggcggtgcgatgaaatcaaactcttcttttctcagctataatgaaaccgctcttcagcggccggatctattaaaggaccgcacgcctagatcatttaatatgaatcagctaggcagtgtgctgacgaatgcagcgccttccattgattcactctttgtctactcgtgcaacccagccgttgtgacacctgaagcaaataaagtaagagaaggtttgctgagagaggacttatttacagtggttcatgacctatttctgacagagacagctgcgtatgcagacattgtcctgccggcaacatccgcttttgaaaatgaggatttctatacatcatactggcaccattatattcaaattcaagagccggtgattgaacgctatggagaaagtaaatccaatacggaagtgttccgcctgttagcccatgcgatgggctttgaagatgaagccttccgcgagacagatgcggagctcatggaacaagcccttcaccatccggaaaatccgcattatgaggacatttcgtacgaagcattaaaagaaaagaaatggatcaaagcaaaacgaggacctttccaagacttaaagctctctactccaagcgggaaaattgagctttattctgaacaaatgaaaaaagacggctatccagcactaccaacctatgtgcccctctatcaggaaagcgattatccgcttacctttataccgggaccgaatcataattttcttaactcgaccttctcacttcatgaaaagcatcaaaagcttgagaagtttcctaagcttcatatgaatgaacaagatgcaaaggcaagacagattgaagacggtgacatggtgcgtgtgctgaatgaccggggagaatgtgagctggtcgtgtcagtcggtcaaaatgtattatctggtgttgtggtcagtcaaggattatgggctgatcaaaaaggcaaaaagcatttagtcaatggattaacaccagatcgcttggcagatatgggcggcggcgcgacgttcttttctggcagagtggaagttgaaaaattatcatagacagaagaaaagccagcaaaaactgctggctttagattgttgacaaagtgctaaaatgatttttattttagcactttgtcttcttttcagcgtgatagaaaacctttgaagtctaggaagggcgagcactggcgcggagcgaatttaacattcgtgagcaccagcgcgcagacctgacaacgaatgcgagggtttgtctacacgctgaagccagcaaaaactgctggctttttttcatttgattttatcgaataatcagctggttggtcatcacatttgcacttccgttgcttcggtagccttctacagttaatgctgtttcatacattttccccattggcatacctaggctttcccattttctgaaatgctcactgacggatacagttccgctcgtacgttttgtttgacgtacactccaatattgcttaaaggtagcatccccaataatagaaggctggttgacacgtagcgtttcataaatgtcatatgtgcctccatcggcataaaatgaccctttatacgttcctgttgggcgatatgtgccccatgactcaacaatgtagtattcagctaatggagattgtgtccagccatagacacataagtaggaattcccgcctgggttaaaggctgcgttgtaattgatggagatgttgccaagttgatgatgagttttagtggaatcaaacttcttcccttttcgaaacaaagcatttccaatattgttccattgtgcgctaaatgctccgccattattgagtgtcattgaggtatttccgtaatccttccataattcaaaatcgtatccgctgtgtgtgcctattctattatcataaatcgtttccgcatgagctggtacagcagtcagtgtcagcacaaatccaatacacatcacaaacaacagcctcaatcttttcaaattcatttttcatccctctccttttttcattcatattattctgccttctctaagatgaaacgagcccatcacctcctttcatgtaacctttcttgctagacagaacggtattgttctaacccggcatggatgtctcttgtttgtgtatagatcttttgatacagatgaaatagatcagcatatatacttgcatgctgctgctctggctcatagacagcagcttgatgaataaactgatctgcacatgcctcaagcgatggataccatccgcagccaacggcggccagcatagctgcacctaaagcaggctcttgttcattgtctaactggatgacctcagcctgaaaaatgtctgcttgcatttgaagccatgtccggcttctcgcgccgcccccaatggagacaatagaatctatgtgtttccctgcttgccggaataaggcgatggattcatttaacgagaaggtaatcccttctagcacagcccttacgatatgtgtcctttcatgtctgctgtctaatccaatcaagcttccacgaacggtagaatccgcatgaggtgttctctccccgactaaatatggcgtaaagagcaatccattcgctcctggcgcgacatcaaccgcaccctctaaaagcgattggaacgattcctctggagccagtaagtgttttacccagttaaggctatatcctgctgaaagggtgacacccattgtgtaaaaagcgtctttttttgcatgatgaaacaaatgcaagtttccttgaagcgctctttcatgatcctcttcgtaagagagaatgacgccagatgtgccaatgctgcataacgtgcggccagaggataaaatgccagctccaattgctccgcaagcattgtctgccccgccagcaaagacttttgcaccctcttcgatccccgcctcacgtgcaatatgcggcaatagtgtaccgacctcatcctctgatgagacaagcggcggacaaatatgaggaggaatatcaaatgcctgacaaatctcttcactccacttttgctctccaatatctaacagcaatgtgccagccgcatcagaatgatcgatatgaacagaccctgttaaacgaaatctgacataatctttcgggagtaaaaacatgtcgatttgttgatcaatttctggttcatgttcctttacccataataattttggcagtgtaaatccttctagcgcctgatttttcgtgatcttttgcagccgttcccccagcttttttgtgatgcgtgtacattgcgctgtcgttcgtgtatcattccataaaatcgcagggcggagtaccttgcgggattcatttaaaagaaccagaccatgcatctgtccagaaaagctgatgccttctactttctttgaatgaacaggctgtcttgccatcagttctttcatcgcagccactgtttgctcaacccaatcctctgggttctgctcacaatatccaggtttatcttgaatgaggcggtaaggcttagaggcctcgcagcacacctttccattctcatctactaatattgctttgactccgctcgttccaagatcaattcccatcacatacttcatgtcttcactccttcaaaacaggtccgctccttcaatcaatcttctaacaaatattgatttaaccgggctttcaactgttcctctcttcccgattcgtttctgatcaaagggtgtttgagcgcatactcttctaatgtatgaaagtttgcctttccttctgaaatgtcacggccaatcccttcagaaaaactgcgatacctgtgctttatcacatcttcaaacactcgatcttctatgagtctatgagcgacccgcagtccttttgcgaatgcatccatacccgcaatatgggcatacaaaatatcttcaagctcaaaagaagctcttctaacttttgcatcaaaattgagaccaccagttcctagtccgccattttgcagaatttcatacatggcaagagttgtggcatataaatctgttggaaattcatcagtgtcccagccgagcagcgtattcccttggttcgcatccacagaaccgagcaatccatgtattcttgctactcgtaattcatgctcaaacgtatgaccagcaagcgtcgcgtgatttgcctcgatattcaatttaaaatgtgaatctaatccgtattgctttaaaaaggcgatagatgtcgctgcatctgcatcgtattgatgagtggttggctcctttggcttaggctcaattaaaaattggccagtgtacccaatttcctttgcataatcaacagccatatgcaagaacgacgccatgtggtcaagctctcttttcatatctgtattcagcagagtatcgtatccttctcgccctccccagaaaacgtagttttcagcgccgagttctttagctgtttcgatgccttttttcacctgtgcggccgcataggcaaagacatctgcatgacaagatgtcgctgcgccgtgtacaaatctaggatgtttgaacatattggccgtgttccagagcagctttactccgctatcccgcatgtattctttcattctatctaaaatgatgtctaattgttgattggtctcttgaagcgtatctccctccggtgcaatgtcacggtcatggaaggaaaaatacggaacatccaatagatcaaaaagttgaaaggccacttccaatctagctttcgctaaatccattccgctataggagtcccaggctctctgcatcgtgccagttccaaacatgtctgttccatctgcagtcaatgtatgccaataagcgactgagaagcgcaggtgatctttcattgtttttccgccaatcatttcgtttggatcatagtgtttaaaagcgagtggattttttgattgttttccttcatattgtatttttccgattccttctaagttgtgtaacgttttcatatttgagttagccatcttttattcctcctatgaatatacttagtaagttgattcaacaaactaatgttcaatctatgatcaattcactttgaattttccatattttttagttttttagaaatattttcgttataataaagttaaaatcatccttcttacagaatacaggcgaacaaaaacagctttttttcaacttaatctaaagacgaaacaaatggagtggataacgtggatattgctgatcagaactttgtgaaaaaaataaatcaaaagctattattaaaagaaattctccagcatgcgccaatttccagagcaaaattatctgaacgcactgggttaaataaatcgactgtttcctctcaagtaagtacattaatgaaagagcatctcgtctatgagatcggtcaaggtgagtctagcggcgggagaagaccggttttactgatgtttaataaacgtgctggctgctccatcgggattgatgtcggcgttgattatgtcaacggcattttaaccgacctcgaagggtccattcttcatgaagagcagatcaagctcccatcaagctctcctgatgtgaccatacgcattttaattgaattaatacagcagttgatggcacaaatcccctcttccccatacgggctcataggtattggcctatgtatacctgggttagtggatgccgatgaacaaatcgtgtttacgcctcattccaaatggaaaaatgttgacctgaaaacaacgctccaagacgctttccaagtacccgtcttcattgaaaatgaagcaaacgcgggtgcatatggtgaaaaaatctttggcgctgctaaacactatgatcatttgatctatgccagcatcggcactggcattgggatcgggatcattatcaatcatcatttatacagaggctcatacggcttttctggtgaaatgggacatatgaccatcgactttaatggaccaacatgcagctgcggaaaccgtggatgctgggagctgtatgcatctgagaaagccttgtttcagtcccttcaaacaaatgatcagcccatctcccatcaagacttggaacagctggcgacgttaaatgatatgaaaacgctcaatgccctgcgcaactttggtttttaccttggcgtcggtctcacaaacgtcctgcatacctttaacccgcaagcgattattttacgaaacaaggtgattgaagcacagccaacggttttacgtgtgattcaagaggaggtatcctcaaggatagatactcaattcagttcacatgtagagctgcttccttcgtcattaggacacaacgcaccggtattagggatgacatctttagtcattgaaactttcctgcaagatgccaccctctcaccatgacaggttcatagataaaaaagacagctcttagcgtgttgtcttttttatttatctgtttcctcataacggaaatagttgaaatcagcaggaagacgctcgccgcttgtatcctggcactgcatgccgacaaatgcccctgtaaaaaatccccctcctcgaatgaagtcatcggataaatggcttgattcaaatgacacatcaatttccttccattctctttgatcaaaagaataagaataggtatatgtctctttctgaacggtcacttttaaatacacatacgtgacctcctctggaatgacgattttttgtgtcaacggctgagaaaaggaaaggttttgacagacagatagttcaagaatgcggccaagttcctcgtcatatgtcacctgaagcgctgtccaattttccgtattataataattcacaagaccagcggcttgctgaaaattctctggaaagaacgacacagctgtctctgcttcaaaataaaagctttgccagcgccttgcaacgaaagcttgggtaaacttagatgttagagattcctgaccgtataaccttaaatgctgaggtttttccgttaatgaaccgatctgatcagtaaaagggattcttaatgtttggaagtgtctatttaacgttgattctttaaattcatcgactgtatggtgtgtaggagcaaaaaccttttcgtttatcgctggcgcttcaacctccagcgccccctcttttccgcccacaacatacggccagccatccttccattcgagcttttgaatcgctgtttctcttcctaaaggacaccaccctctctgttgaaaaatagattccttgcttgattgaatggggcggccagtgagatgagccaaataccattcatttgtatgcgtttgaacgatggaagcatgcccgcatttttgaagcggatgttcaggtgcgtgaaaagcacttaaaatggggttatcaggatgaacctcataaggcccttcaatctgcgaggaacgggcaattgttgccgcatgctcgtaccgggtacctccttctgctgttaataaataatagtaatcaccaatgtgataaagatgcggcgcttctgtcaattttatcggcgtgcctttaaaaatgaccttccgctgaccaatgagtttcttttccgtcacgctatattcctgcagggcaatacccgcaaatgaatggtgcttttccctatgatcccacagcatatttaagacgtatttcttgccgctttgatcatgaaataaagagggatcaaagccagagctattgagacggaccggctcactccaatcaccatccacttcacttgccgtgaccaaataattatgaccatctttaaatggaccatccactactttgatatctgaataaatgagccaaaactgaccatctgcatagcttaggcacggtgcccatactccgccagaatcaggattccccttcatatccagctgcgacgttttttgcaaaggacgcgcagcaagccgccaatggactaaatccctcgaatgataaatttgcacccctggaaaccattcaaatgtagagaccgccatgtgataatcttctcctacacggcaaatacttgggtccgggttaaaccctttgagcactggattggtaattttcattcaacttcctcctcttcacgacctacattttaaaatcatccatatgatcgatatatacttgatccctattctcaagctcccttacaacttttttgtgtttttcttcatctaggttgtaaaaattaatatcaatcatcgctaaaatcagtaagcatacaggaatcaccgttaccgtaattaaaatgccaagtaatgcttctggtgtctgcatttggttcgcgacatagccaaatcgatcgagtacaagccccggcacaatcccgcctaacgccatcccaaatttaaagaagaacccaatgaccgcgtagatgagcccgcccatccttttccctgttttatattcgccatattcaacagtctctggaataagtgcccacatgtaagcaccggctgtaatactccccgcagcagcaacgagcctgaaaatcagtattaaagtgatttgactcggcggtatcacaagtaatgcaagaagacctacgatattcagcaataaagaataattcagcagctttttctttcctaacagcttgtgcagcttaggaataaacggcagcaccattaaagctggcagactgccaatgagtccgtaccatttcactaaatcttctctgccaaggttatacgtcacataatagatcccaacagagttgctgatcgagttcacaccaaaaataataataaagaaaatgcttaatacaacaagcggacgattcactcgcaactggacaaagatatcactgaatttaatcttttcctctggcttttgaagcgtgacacgttcattcgtgcttttaaaacagaaaatcagtaatgcaccgccaagaacgccgagaaaagccatcgtcatctgccagccgagtgctgtattacctgtcgtatcacttaaaaaggtcgcaagaaaaggaacaaaaaaagccacaactagaccgcctagattggcaaaaaccatacgaacggacgtaatactgacaacctcttggttatttcttgtcattgcggaagttaaagcaccataaggaacgttgatgaatgtgtatgtaagcgataaaccaacatacgtgatgtaggcataaatgagtttacccatttcggaaaaatcaggtgttgtaaagcaaaggatggcaagtacgacgaaaggaaacgcaccgaataacaagtaaggtctgaacctgccaaaacggctgttcgtccggtccaccaatgcaccaataaatggatctgcaagcgcatcgatggcgcgaacaaccaaaaacatcgtccctgctgctgccgctgataaaccgtacacatctgtataaaaaaataatagatacgtagagacagttgcataaatcaaattacatgcgaaatcccctgaagcatatcccactttttcagacatacgaatcttctttaaattctcactaaccatgagctttctcccttcttcacttagcctcttctaacgaacagatgatggagggcagcagcaatcaatgcgggaaatataaagcgctttcaattcgttgtaaaaatgtagctgaacatctcatcctttcagcttagcccatttaagcagcaaatcagttgaatgacggaatcatctccttcaatataggaatcaatgcttgaaatccatcttagtttattgaccaaacaaactaagttgaattcattttataaaatctgatctgacttttcaatattttttgaaaaaataatccaaataatcgattttttgtcattcatcttgtaaaatgacatgaaaatctgaaagaattcatttaatggttgcattcaagctcatcccatgctatattaatcaagcgatgagctgaattgtgtaagtcgggtaacatgtctctttgagacacacacgaatgtggcgtgtggttattccgcctcaatacgcaaaagacatcttctgaggaagatgtcttttttcttaccctatttttgttccattctcaaccggttcatctgtggctagcaaaaccacgtcttcttttgatggcatgcctcctaagacaagcacttctgatttgaaccctgcaattcttcttggcgggaaattaacgactgctacaatttgtttgccggtaagattctccgctgtataacgctttgtcagctgagcactagattgctttacaccaatttcttcaccaaaatcaatcttgagtttcaacgctggcactcttgcctctgcaaataattctgcttctatgatcgtcccaacacgaatatctaacgccaagaactgttcaatatctgccatatgactctctccccttcacgaaaggtaacgtaatctattgattatccattgtagcacattcatttcgtcaaaaaggaggttcaaaaagcctattcagcgctaaaatctcccttttagtttacataataaatttatagtcgtgtattaaatgtttgcatcctgaaaatgaattcagtaaaatggcaaataatcctactgcttcctcccgaatatattggggagggttcacacttgtttacattatcggatatgtggacgttttgctggtcgtttttcgtcattcttcctatcgttgccatccttcatcagcttggccatattgtggttgcgtggatgtttggggcaaaggtttcctttgctcttggcagaggcaaaaaagtgttgaaagtaggcgtcgttgaaattagacgaatctattttctagatgcattttgccactatgaagaaatgaggaaaaataaccgattttcgcacattcttgtctacttaggcggttcattatgcaacctgctcagtgttctcatactgaatacaatgatcgccaatgatttcctgccagagcaccaatttttctatcaatttgcttacttctcagtctactatgtattttttgcactgctgccagtccagtatgcagatcatcatccgagtgatgggcaagcaattgtgaacatcattcggcacggtgaaccatgtgacatcattgactaacatgatgactttcgctgtcaatatgataatgaatcgttaaaaaaggaataccgaacagcttcatttggtgtaccgctgtgagactttgatctgtctccggcttcatatgaaagctttcttccattggcagtttcatggtgataaaaggcgtatgtaaatacaatccttcgtcaccggtactgccttttggacgtgtgctttttaatagaaagtcttccttttcattaaaaggctttaaaatggcagtcagctgagaatacggaagcggcagcgcaatattcatataacccgcagctgcatcgtgatgaagagcataaagtgcaaaaaagacttgctccccttttgcgttatgacgaatccacgcacgcacattctctctttcttccttagggtgttgaaatctacaaagacttcccggcatttcataaggaatacgagatgaccccaaataaagctgacctattttcttaaaaactggctgaagtaaaaaaacaaaaggcctcacccaccaatgaaagctgacggctgcttttaacgtaaaagccatagggttctcataaaatctgcgaatcacaggtgaaacccgatcagctgaaaatgtcgttccatttaattcatcaagtgaatcgactaaaccgagcttctctcgatcgtgcactctttcctcttgaaaagagatcaaatgaaagcgaccatgcactttcgaaatcggaaaatccttctgcttcaattgatccttcggtccttcgatcacccagccaattaaacctggcaaaatcacaaaaaaagcattgatactgccatgaaaccaaatcatctgatcaatgctgatgtaggtcacgcgcataagcatacccgctgaataaagaagagataacacgatcgtccccattaaaacaaagctagaaaacacaacaagaccttttgcgaaagttgaccgaaatcttgttttcacacaaaggattccatatatgtagagggcaaccacataaagaatgacgctgaatgtatcaaatagacgggagaagctaatcccaacagcaatcatcacaggcgacagcaaaatcacccagcccgccgctttgtataaagctgtctcctttgttcgctgtctccctaataatccataaaaaagcgggataaaaaaagccgagtaatgaaaatgaatagcggtcaaaagaacaatgatcggcgaaaatgtcatcacctgtatatctgctgtgtacagccaaaaccaaagcccgcctaaagcgatatacatccatgcgccatcgatcatcagctcatgaagcggaaagattcctcttttcagcaaacgagcaaagccaaataacgccaacaggaatgtatataaaagccagcccgatgcaaaccaggcggaatgatagataaaagcagcggttgcacaaagagccgctagtggaaaggctttcattaaaaagccgatcagcatccctggcttttgtttcttcccttctttctcaaaaaagtgtaaggcagcgggaagaaaaaatagaatcgccatgagaacaaaaaattctgctatcggacctgtcatcaaacgggtggcgataaaaaaagacataaagatcagactggaggtcaaatgccacttattcatcaggagacatcctttctgtaaaacggcctttatatgtaaaaagagtaccaaacaggcgatttttcacgtggacatcaatggtatattcacctgcatcctcatcgtagccttccgttacatctgacacaccataaagccatgaaggcagcggccattccctgccgaacatcaaaaacttctgccggccggattgaatgtgcaggaaaccatgctttgttactgtaaaatgaagctctgacacaagaagtctaggctttccaaagtagtctaggactgtatgactcttctgatcaatgatcatatctgcatcaaagtgccgctccttctttgggaaataaaacgttcgataccagtgcatcccttcctcccccttatttgtcacaaagggctcattgacaatttggaaaggaatatcttttcctctctcagggaaaaaacaacgaaacaatggaccaattctgaagatcaatcgaatgagtcttgacccgccgcctatctcccccatggtgccttcagcagaaaacgcgcggttgtatctctcttttagttttggatgcagcttatcgtaatcctttacttgatgacgatgaacgaccatgtctacctcccctttttcgtttgatggaaaatacatctatacaatctcttaaattgatcatacctgcaatcgacaagatgaaaaatgcactcatcacaagcggctcatgaagcgtcgtttgcggggataggatccctatacaaagcatgatcagaaaaaaaatgctttgtagaatgaaaagatatttttttgatagcttaggaattagccatgatacacctaaaagcgcataaaacaatcgaaatcccatgctatgatcaaaagcagaatgtgaaaaagggatgaccgcttggcatagccagacgatggcaaacagcaaacaaatcccgtaatgagcaagtgttctctctagtaataaccgaggatgcgttcccttttcaagccacgtctttaaagcgccaaaactaaaggccgtcataaatcctatcatcgggcgaaaaagaatccggtctgcccatgtccaaccttttccttctttcgtttcgtaatcaaattgagtttgaaatacaatgtgatcgcttgttttcatatacttccagtagccactgccttctttgataaaagacaatgggtgtgacgatttgaatttgagcgaagatgcccgctcattccgttcatccatcattcttgttcgatacgctcctgtccctgtgacacttaaaccaaacccaagatgcttttcatacaaaaaggattggggctgttcattttggggttcatttaatgaaatggttgaaaaacgcaaatcccactgttcatgaagctttggattttgcgtatattcccatactttctctataggtgcatgaatggttgtttccacataaacaggctttcttttcatctgcctctactcctctatgtgaattatttcacataataagcataccatgtttcacaaaactgtcaaatctttattcgttttctgttaaaaaaattcttcaagacggccgcccttttaagatatcgattcactgcaaaaaaaagacctgtcaatgagacagatcttctttttgcaacacacctgagatataaagcctgaccgcatagctcacactgtcttcaagctgttcttttcgttgaaatccctttttatttgaaatatcaccgaagccgtgcaataagcttcttagtcctcttaccacatgtgtcatctcttcttcttttacaccaaagcgggacatgatggattggacaaattcagcaaggcgctctgcctcgcttcttacttttttctcatccatatgtgaaaaggcagcttcatagagacctggatgttcccggacaaattcaacatactgcctggcgaaggctaaaacagcttcttctttatccagcccctctgttacgtgtatgccttcttcacaaagcatggacagcccttttactgcgagtgccgcctgaatctcatgaagaccggatacgtgattataaagggaaggcggtctgatgttcagccttttagacaatgtagcaatggtcaatgcagaaaacccctcttcatcaacaaatgcagctgctgtatccataattttttcttgcgtgatacccattcttggagacacggtttactgctcccctttcttcagctgctgctgccttttacgaacggcagcttgcagcttttcatgaggttttatgatgagatcgccatgtcctgcagcaagacaggataagcgaagtgccagtaatttttcggcgctattgagtgcggtttctgcatcccatgtagcaaaggccgggaacggaaaggtccagcgaaattcacccgttactgataagccgccttttgttacaagggcatccccagcaatcacaactcctgaccttccatcgtataaggaaatgctgccaggtgtgtgccctggtgtcgcaatgactttcagcggcccaatctcatctccttcttcgacaagcacatccggttttgtgtgaatatttctcgaaaaactgcctttgattttttgctggggttcgccaggaagcaaggataagtcaccctcaaataggcgggcatcgcgttttgataaatagacgactgcctctggaaaaacttttttcacttcatctaatgcgcctatatgatccatatgactatgggtgagaataattttgtgtatgggtttgttcttttgacgggcaaattcgataatcggctttgctgccatttttaaagcagcatcaattaaaatgagcccattctcttcctcaaatacataacaatttaccggaaataatcgcggcatcaatgtgagctggtgcagacggtcaaaagttgtcaatctcatcaagtgtccccctaaaactaatgttgttagttttatattaactaatactattagttttagcaactattttttcatcgaccgcaatataaatatcaatttgcgcttcttttggatcaatagacctttcatcgtaccattcaaaatcccctgtatatgtgcgaaaataacgctgatcccaattccaaatctgctgccatgtttcaagcacaacttcttcaatcggcccctttctcgttcgaaatcttgcgtacgtggacgagggaatctcttttacatgttctaagtgctgatccacaaagtgtcccgctgtgaataaataagagccatgctcatctttttcataatctgaatacagccctatgacgggcgcttgtcccccgtgaagctgctgcgcaaaaaattgctgccaaagaggtgcaatcttccgctcttttgtcagctccatttcgtttgttgttcgaacagacaaccctttcatccattgtttctctaatgtcacgatatcgtacatacattctcatctcctttttttctatcatataaaaagaaacctgacaacattgtgtcaagtttccattcgtttgagaaattgtttcaactggagatcaaacgcttctttgacatgctttggggaaagaatgtcgacatctggacctaaatggaataggaaactatttaaccaatcatcttgaggtacagtgatggtggcaagatagcttccgtctaaacatacgttcaattcgttctcatccacccattccttcactttgcccactgatgcttccgttaacctgagcgtgacagagctgaccgatggttgttcttgccaagagtcattccaaggcttctcttcgtttttgattcttttcggttggaaatatcctgaaatggtgacaagacccgtcattctggtcagcttgaacagacgaaaagcttttttcacacaacaaaacgcatacaaataccaatgccttccttttaaaacaagcgtataaggctccactttgcgtggaagtgtttcgcctttcgcattgcgataggtgaactgaatatattggtgcgctgaggcagctgtatggatgagctggagcttctgctcagcctggctgtcttttccccaggagcttaaatcaatgaagacatgatgctgtttttcgctttcatccgtatgcgtgggaatgagcgatttgatttttttcagtacatgctcactttctttaaaggagtacgcactcgtcatgctttcgagggctgttaaaatgacctcgatgtcatcatcggtaaataattttttctctaaacgatagtcctcaacaagtgaaatgcctccacctgctccttgggttgtcacaatagggattcccgcttgattgatggtatcaatatcacgataaatggtcctcacgctcacttcgtggagttcagcaagatctttcgcctgtacttgcttcttgctaatgagcagcatcacaatagataaaatgcggtcgattttcatgacttttcctctttttcataaatgtaggttttgttttgataaaaaaagaaagaatggtaaagataagtaacagccagcattcgtttacatccctgcacgtgcaggaggaggttgcatcatgacacataacgtgtggcagttgttcatgattgggagcattatgttgatctgcatcatgattcgaatgaatcgaatgagacgctatcagcttgtacgccccatcagtcttttgatgagaatgtatatctttggtctctctgcccttattctcctatcagaaggatggcaaaatcacagtatcttcatctatgccgctattggcatgctttttggaagcagcctggctattcatgcctatcagacgattcgaatgaaagaagaaaatggccggctgtatatgaaaacgagtaaatggattgaaagcttcattttatgtttgtttttatccaggcttagttttaagctggttgagctgacaaaccattcgatgaccaagatcagtgtcgttgaactatatcagcatatcgtgagcgatgatgcgatgaccatgctcagcttttttcttttagctgcttactatgttgttttttcttatcacatgatgaaagcaagtaaacgatcgacacatgtgcatcatgcataaaaaccttcctataggcgtaggaaggttttttattaatcgtgctgtgcatggtgaatcatctgttcaagcacttccatcacatgctgatcttcagggctgtaaaaaatcgaggtccctgctcgtctagatttcacgagacgaaggttttttaaaaagcgcagctgatgagaaacggttgattgcatgagattcagtgtttctgctatatcatttaccgagtgttcaccttgagacagcaggtgcagaattcgaatacgagtcggatcagataaagctttaaaggtttgggagacaagaaatagactttcttcatccagctccatccgttcctgttcttgatttgtattcagttcttccttcattttgcttcacctttcttgtccgtcaaatcacgacttattctctgtatcatcatataccaaaacgtccggcatgcaaagcgggcacactttagaaaaaagatttactcaaatagcattgacacttggtagcattctttttaaaatgagcattatttattcatttttttagaggagctgataggcaaattgactgaagagccaagactaaaacgcagcctgactgtctttccacttgttgtgatcgggcttgcttatatggatccacttgtcgtatttgattcatacggcattgttgctcagctgacgaaaggacacgtcgctgcagcttatatatttacgttacttgcattactattgacagcgcttagctatgggaatatggtgaaggcttttccaaaagcaggatctgcttatacatatgcgcaaaaaagtattcatcctcatgtcggcttccttgtgggctggacacttttactggattatttatttttgcctatggtgaattttgcgatcggaagtgcttatttaaccgcagcctttcctgatgtacctcattacatttggatcatcatacttgctatcgccataacgactgtcaatgtaatcggtattcggcttacagccaacatcacggcactatttgtgaccttccaggtcattgtcgccgtcacttttgttgggtttgttatttatgggctcacacaaaacgctggaagtggagaattattgtccgcccggcctttttattcagcgagcttagaaccagcgcttattttttcaggagcgaccattttatgtttttcgtttctaggatttgatgcaatttcgaccatgtctgaggaaaccattaagccaaaaaagacgatcccacttgccatcttcttaaccgtcgccattggaggcgtactgtttaccttgacgtcttattttttgcagcaggtatttccaaattttcaacagttcaagcatcccgatgctgcctcacttgaaattgcggaatttgtggggggcgcatttctccactcgttctttttagctggcacaatggtcgctgtcatctcttcttccttatcgtcacatgcaagtgcagcaaggctgttatatgcaatgggtagagatgagtcgttaccgaagcgtttcttcggatatattcatccgagattaaaaacccctgtttttaatattttattaattggtgctttctccttaaccgcagtcgttggcgaacttgaagtcatttattcctttatcagcttcggcgcgttgattggattcacttttgtgaacttgtctgtttttgcgtactatttcgtcagacaaaaacaaagaggtgtactcaatacattgagatacgcattgatccctctgtgcgggacggccttttgtatttggctgttaacgagcatcagtacaaatgcattaatcattggtatgctttggctgattatcggttttgtttatttctgctacagattgaaaacaagacccgaatttacatttgggtatgattgattataaggttttcacttggtatcctgtgcaggatatggcataataaaaaggctgtacttcccttttaaaagcggggcaaaacaggggtgaactgaccttgaaaaagaaaaaaacaggatgttttgccatttcaggctgcttcacgatttttctgtttgttttcgtattagcagccattgtcatgtcctttaatcaaaaggaattaaaaaagctgccgattgatacggaatcaattgttttgtcgagattggatgattacaagccgcttgtagaaacagagctaagagatcaagatttagatcaatataccgcgttaatcctcggtatgatgtatcaagaatcaaaaggcagaggcggagatccaatgcagtcctctgaatctcttggtttgaaacgaaatgaaatcaatgaccctcagaaaagcattagacaaggagtccatcatttttctactatgtacaagcatgggaagaaaaaaggcgttgatttggaaaccattattcaaagctataatatgggaatcggctatattgattttgttgcaaaaaacgggggaaaacattccgagaaattggcaaagcaatactccaaaaagcaagtgaaacaaaaccccgaagtctatacgtgcggaggcaacaaagataacttccgctatccgtattgctacggtgatttcacttatgctgaaaaagtaaaagaaaaaacgaaaacagttgaagaaaagatgaaattggcttcatcatccacaccatcatcgtaaaaaaagcacttccgtttaggaagtgcttttcattttatcgctgttctttcccgatttccggcaggatcgttttcgctaaatgctgatccatttcctcatagtcatcatattgaatcgtttcatacagctcttttctcgtttgcatgtccttcaaaattccttgctgcgtccccttctccatgatttctgtaaataaacgctcatacgcttttgcagcgactctaagtgatgacacagggtagatgaccatctgaaatccaaacatcgaaaattcatctgcatgataataaggagtcttaccaaactccgtcatatttgcaagaagcggtccttttatgctgcttgacgcatgcgtgaagtcttcagctgtaatgagcgcctcaggaaaaatagcatcagctcctgcttcgagataaagattgcctctgcggatgacatcctccatcccgtttacagactttgcatcggttcttgcaatcactaaaagcgttggtgccgcttgtttgatggctttgattttcgcgatcatctcttctactggaacgagcgactttccgtttaaatgtccgcatttttttggcatttgctgatcttcaatttgaacagctgccaccttgctctctaccatttcttttgccgcccttgcagcattcaatacgccgccatagccagtatccatatcgaccaaaagcggcagctgagaagctcgaatgatttccttcgctttttcagccatttccgttgaatggatcatgccgagatcaggcagtcctttgctggcacaaaaagcggcgccagataaatagagcccttggaagcccattttttttgcataaagcgcagacattccatcgtgaacgcctgggatttgaaataaagctgatttgtgcatttgttctttaaaggctgcggctaaatctgcttgacttgattcatcattcacgatccacacactagttcccccttatatgacgaataggtccataaatgctggtacggttgttgtttttaattgatttggattttgacagagtgacacaatttgatccacttgtttttgtggaaatcttgtcttcaaatgatagacccatttcttttcaagcagcggaatgccttcctgccttcttctgcgatgaccaagtggatattcaatttcgattcggtctgtcatcgtcccgtctttaaagaagatctgcacacagtttgctattgatctctttttcggatctaaataatccgctgtataacgtttatcttctttgacaaccatttgatcccggagacgatcaatgaccggattttgcgccgtttcttcttcataatggtcagctgttagctcaccatagatcaatccaatcgcggtaatatactgcaagcaatgatcgcggtctgctgggttatacagcggccccttcttatcaataatccgaatcgctgattcatgtgttgtaatctctacccggtcaatgtcatctaatcgatcttttacagcatcatgcagcatcatagcggcctctgcagccgtctgggcatgaaactcagcaggataagcaattttgaaaagcacattttctatgacgtatgatcctagcggctgagcgagtgtgagagattttccttgcataagaacatcttcaaagccccacttctcagcactaagcggtgtttgatagcccatttccccttttagtgtcatcattgccagtcttaccccgcggcttgttgcatcacccgctgcccacgatttccttgatcctgtgtttggggcgtggcgatacgtcctaagcggagaattatcaacaaacgcttgcgataaaacatgctgcacgtcttcctttgttccgccaagcaatgcacacacaacagcacttgttgccactttgacaaatagcacatggtccaagccatttcgattcagacaattttctaaagcgagcacaccttgaatttcatgtgccttgacgatcgcatgcagtacgtcattcatcgaaagcggctcttcaccgtttgcaagccgcgttctgctgatgtaatcacttacagctaatattccgcctaagttatctgacggatgtccccactcctctgcaagccacgtgtcattataatctaaccagcgaatcatacagcctatatcaaaagccgcttgaacaggatctagcacaaacgaagtgcctggaactcttgctccgttaggcacaacggtaccaggtacgatggggccaagatgcttcgtacattccggaaaattgagcgccagcattccgcagccgagtgtgtctatcagtacatatcgcgctgtttcaatggcttctttgctcgtaatctccccgtctactgcataggctgcgatttcttccaatagctgatccgtttgattggcgactgctgttttattcatgttcattcccccgtttttctatcatcatctgagacttttaatcctcttggccctaaataccggactctcggtctaaaaatgcgattatgcaaatgctgttcaatgacatgggcagctaatccgctagctctcgcagcaaagaaaatcggtgtataaagtgaaatcggaatcccgagcacgtaataaatagatgcagcgtaataatcaagattcggatagaggtttttcttctctttcatgtatgcctctcctgctacacacatgtcataaagcgttgtatctccctttgattccgtaagcgttttcaatgatcgttttaaaagagcggctcttgggtccatttttctcatgtataccctatggccaaagcccatcattttttcttttgcggctaattttcgttcaatcagcgcaaggaatccttccgttgtttttccttcgagaagcatgtgcatgacagcttcattcgctcccccgtgcaagtcaccttttaatgaagaaatcgctccagtaaaagcaccatacatgtcagaatgtgtggatgcgatgactctagcggcaaacgttgaattaggcagttcatgttcactatataatgtgagtgtttggtcaaaagcggtgatttcgtcttgtgttggagtacgtcctgtgagcatggctaaaaaggtttcagtgtaggatttggtctgatctggagaaatagcggcgtcttttgtgagaatatgatagcttccagcaacaatggccggcagctggccgagtaatcgaacagcacgcctttgctggcacgcttctgatcgatcatgtaatgcatcatcgtacccactaagagcagatatgcacgttctcatggcatccataggatgagtggtttttggcagctttgttaaaatggtttgaatggttggatgtaagttggtttgtgaggaaatgtcttgctgaaattggtgatattccatggtatctggtaatcttccataaataagcagataggctgtttctaaataggtctttttttgtgccaactcgatgaggtcatacccgcgaattacaatttcttcttgctgcacatctaagtatgagatagacgtttcgcttgccacaatgtcttcaagccccggtttatactgcagttgttcagtcatcatacaacccccgtttcgttcaattgttgttctccaaacgagcaaacggccagaaatgatgtgagtctatagatgggaagataccgtgcaagtcggatacccaattcccattttatccaaagcactgcctcttgtaaataaaagaacgtatgtccagttgggcatacgttagctgtaatatggagaaatcatcatatacacaatgacgccagtgagactgacataaagccatagcggcattgtccagcgggcaattttacggtgacgctcgacttgcatctgtgcacctctaaacagagtaatcagggcaagcggtacaattacagctgataagacgatatgtgtgattaaaataaagaagtaaattggacggatgatcccttctcctccgaaatgggtatcagctgccattgaatgatatgtcacatacgaaattaaaaagacaagtgtcgttgaaaatgcagcaaagataaatcgtctatgcgctttaatgttcttttgtttaatcatgatgagtgctgaaagtaaaaagataaacgtaaagctgttcatcacggcattaagtaacggcaaaaatgtaatatccagatggctaaatttatctgattttggcattaaaaataataaagcgattaatccgtttatggcaattgttaaaatgatcacaataccagtgaaatttttcggtttttgattctgttcgttcatgtttgaaaacctctctttattagttccgactaagagtatgttatttaactttctctataaagtcaatgaattcgctgtcttcgtcgaattttagacaaacttaagggttgcaggcgttctaacggcttgaaagatccatccacttcctttagaattggaatttatgtgatttttatcatttctgatatgaaaggagtaatggacttgtcaatcttacaggaaacagccaaagatgtgaagacgttagagcaagaattacagcaattgcagttccaaatgtatcgaatgcaagaaaatatgaaagatatttcgaaaaaagcaaaaatcattggcatcgatcaagcgaaagaagatgagtggatgatcgtctctgccattgaaagtgcagatacatgtaaaattatgttgagcgattgtgaaaaagcttttcgcggacaatctgatttttccttaattgcggaatatcctgaagaaggaaagattcatattgccgatattaaaggcccgccagataatgggtacggctccatctgtatgaagcatttaaaagaaatcgcaagagagcagaacataccagtgattactggcgacctcgtcaaaagggactggaatcacgtggatcgcttgattcatttttatgaaaagcatcaatttgatgtccaaatcaattggaaagaacaaagcggagaaatttattgggtggacagctaacgacaaaaaccagcgtgtatcataagatatgcgctgctttttgtcgaaaatgcaaacttttcagaaaaatatgtgtatttttgaccaaaaaaagggtataataaaagcatcaggccgccacctgatgctttcttccaaaaaaacaattgtttactagttaagtacttttactttgactgattttacgccccaattttgcgcttgggatttgcttggtacatgtacatcaattttgttacctttaattgcgccgccagtatctgctgcgatggcttcaccgtagccttcaacataaaccttacttcctaatggaatgacactaggatctactgcaataacttttgcgtttgggtttttgtttaagtttacccctgttgcagtgatacctgagatgccaccatcatttgctgtataagccgtagccgtaacagtcatttctttttgtacactttgactagcagaagatgattctgctttagctgtttcctttttaggagcagcttttttcgttgtttgctctttttggacaggttcctgtttttgaacaggttctgagcttaccggagccgagctttgaccagcaacacttagtgttgaaccaatcataattatatctgagtttaagttattccaagacttaatatcgctaattgacacattaaatttttgagcgattttccagaggctgtcccccttctggactttatactgctcctgagttttctcttttgaagagattgtcaatttatcacctacatagatcatatcagtagataaattgttccaaccctttaggtcctttagagacacatcatttttttgtgagattccccaaagtgtatcacctttctgtacagtgatttcctttgcagaagcttgctgcgctccaaatgctgttgttgagattgctgcaacagcaaccaaggacataatagtcttcttcataaagtaaatcctcccttgttagctttttatggcggctaacgagtgctatcgtaacatatgtaaatgtcatttcaataacaaaacgatatgttttagattacagttcctttacatgaaacatctctctccattggtaaatcagaccacaaaacggcttgattccccgccatatcaaggttttaaaaggatcgaaaacgacctgatgaaaacgtgtccaagtgcagcgaaaaaaatttatttttcttctttaaacactttattttttctctttttctataaataaacgaatttcttctaaaaaaacatctccgtatttctctcttttttgagcgccaatccccttaatttggagtaattcatcatctgttttaggctctacagctgacatttccttcaatgtttgatcagaaaatacaacaaatggcgggacgccttgctctctagctagcttcattctcagcattctcaatcgctcaaataatgcatcattttcttgaatggcctctgctttgatcgcctgctttttatacactgtctcttgtccaactaacactttcttccctttatgggtcaccttaagtgttgggtaagcaccttcagacatgtgcaaatactcttctgtaattaaaaattcaatgaagtcactgatttgctgagccgaatgttgtttcattaaagcatatgtagggagacggtcgaaacctagctcaagcacttttttgtttttagagcctgccagtacttgggctatcatcattttaccgaatcgctcattcatcctcactgtacaagataacaccatctgtgcttctcttgtgacctcttcacgctctctttcatcaaggcagttgctgcatttaccgcaaggcgaactagctgtttgatcaaaatagtccatcacaaattgctgcagacattgctcagtatgacagtaatccaccatttgccttaatttaagcagttcatgctgatagcgcacctcatcttctgttgactgctcaatgagaaagcgctgcactcttacgccttgtggtgaaaacagtaaaatgcattcactttcaagcccgtctctgccggcacgcccagcttcttgatagtagctttcaatatcccttggaatttgatgatggatcacaaaacgtacattcgacttattgattcccatgccaaatgctgatgtagcgaccataacctggatgtcatcatttaaaaacaggttttgctgctcttctctcgtatggtcatccaatccgccatgataaacgccagctttgatcttttgtttttttagtcgattataaatgttatccgcttctttacgagttgctgtataaataatgccagactcaagactgtttttcttcatatattgtgtgataaaacggtcactattttcccctttgatcacttgaaaggacaaattttctctagcaaacccagtaaagatggtttcttctgcgttcatgccaagctgttcacatatatcttggtgaacctttttcgtcgctgtagctgttaatgcgacaatcaccggcctttttgacagcttgttcaagcattcttgaatgaagcgataacttggcctaaaatcatgcccccactcagatatacagtgcgcttcatcaatcgcgattaaagggatcgttaaccgatccagcagctgaaaaaaacgttcattttgtaagcgttcaggtgtgatataaagcagctcatattccccattttcgcattttttcagcctttcattcatttcagctgcggaaagtgtgctgtttaaaaaggaagaacgtattcccatctcatttaacgcatcgacctgatccttcattaaagaaataagcggagatacaacgatcgttgtaccttccatcatgagggcagggatctgatagcaaactgacttccctccgcctgtcggcataatgcagacagtatccttttgtttatttacaatcgcttcaatggcttgtttctgtccttttctaaagacatcaaagccatagtattgtttcaggagtgcttctgcttgttctaacatccaattccctctccgtcattagttttgtccattttaacatatattcttgcctctacaggcgatctgtccaatttcgcattttcacaaaataaaaagccattttccgaaatggaaaatggcttgaatcatcctaggaaaagctgcggatgccgtaatctaagtaagaaagttttaaaccaccactcctcaaagtgggtgtttgcagaaacgttcctgtcttcctctctaaggaggcatgacattccggcttcaatataaaactccctattacagcttaaaggttaaaacttaattaacattacgcgcatcgcagcctttaaactatattacacgaaagtttattaaatttcaagagatcttttttctaagaaatacttatgtatacaagatatttgtccttgcacacataagaaaacattattctgaaaaaatgtaacttccacttattatcctatttttcttcgtctatgtcaacatcctgctcttcctctaatcgttcatacgtatctgaatgcatctgatccattgtttctctatttgttaaatcacgcatttgatcagagaaattacggtcaaactcgtttgggtcttgagtcgtttcttcgtttttcttcgcatcgattgaataacgtgtataggggactgcttttaaacgttcatatggaatgtctttccctgttttctcacatatcccatatgttccgtcttccattcgttttagtgctgcatcaatttcgtcttcaagctggccatcaacttgatccagcgtttgttctgtcatgcggtctaaatagatgctcccatgatcagcgatatggttcccaacaccatttgaaatctcgctggattcacttagcatagattcttctttcttttttgaccctttcacatcttcttttaattgattcaatctttcgtataaatcagctttttgttctttcgttaagcccacggtcaatcactcctttctcattaacttcccgctgcaagggaattgaaaacatcaaaaaagccgccgcctttttggcagcagctttcttctcttacatggtgcgaagtgcttcttctactggtttatcccctttaatcaagtcaaaggatttatttttcacattggattccgttaagctttccacaagtacagcggctacgtcctctcttgaaatctcaatgttttgatcatctggaatatgctccgcagcttcaatctttcctgtcttttcatcatgcagcaaggcgcctggacggacgatggtataggaaagcccagactgttttaagtgttcatctgcttttcttttcgcctcataataaatttccatacttccttgcccttttccctggtttgggtcatcggcattataggaactcagcataacaaaatgctgaatgttttcttttttcgctgtgtcgacaaggcgttttgcaccttcttgatccactgcaatcgtcttatctgcacctgtttttgagcctgaaccagctgcaaagatgacagcatctgcttgtttcacagcatctgtcacatccttttcaagatcaccgatgacaggcgctgcaccaagttcctttagcgcatccgcttgtttttcatctcgaatgagagcaagcggctcatgtcctttttcttttaaataacgaatgacgagcctgcctgtatgtccatttgctccagcaactaatactttcattgttcattctcctttctgtatctgtttcatctttatccttttttgctatcattcaaacacctaaacaaaaaaagcccttcccagaaaatatgggtaagggctcaggaaatgtgcgatctattaaaataagtagaatgagaaaagtgcatgatctatgtaatcgcaaggttgatcagcaaagatgttttgtcaaaatggcttgcacatcactcaaatccgtctctttcgaaaaatcgagttcaaatacttttgagcttgtgacaagcagcatacctgtgtcctgatcaaacacgccagcttcttgaatggcaaaactttcaattgatcgatacggcaaggagaccctgactttcttcttagaaaatacgcggttatcgccaaagatcagtcgtttattggtgaaacaaatttggtcgtgacgcagtctgtaaacagcctcaattctttccccttcaattagtaaggattcgaatttcttatcattttgtttactgacagaaaaaatacccacgtaaaccccctcttcctccatcaaattcctttatgaaaaaacggacgcacgctctgtgggtacgttttattctcacttatagaatacgctataaatggtcgttattccattacgaatagattaaatttcatttaactttttctttttgattcgatgctctttcctctacttatttagacagttaaagcaggaaaaaagtttcagttctttttgagaaaaattgctgaatgttaccaataaaaaaacagtgattttttcaaatcactgtcagcgtgtatacaaaacctcgcattctttgtcagtcctgcgcgccggtgctcacgaatgtcaaattcgctccgctccggtactcattcttcctagactgcaaaggttttcatgtcacgctgaaaaatgaagacaaagtgctaaaataaagatcattttagcactttgtcaacaatctggactattcgtcttttggtgtatcaatggttccctcggcatatacatcggaaatctgctcaagcgtaatcgccatatcagcatcttcgtgatcatgccaagcattttgattattctgctcgtctgtttgcttctttttcatcatcatcaccctttactgtttttcttagtatgagtgatgatcactaaaatcattcagcagaaatgtcttcgaaatactctttataatacccgcctactttacctgtattatcaacgacaaagaggaattcttctgtctcatttttcacttcatatgtgcttccaaccgttagtgcacggtcgaccatatattttttcgcattcgtatgtatacattttacttgctttaacgtttgagccgtttgccagttttgatggatcatgatttaaaaactccttttttcatctatacatttattgtagccaatttttcgtgaaatgcaatgagtgttatggattgcttttaaacatgtcgtgtaatatgatgaatgtatacgtttacacacatgtgcgtatactggttcatttgcttcaggtccgcttttccacctagaactcgcagaacaacccatatctttaaggaggtttgtttatttatgagctctacaacacttcaaattagttcaaaactcgattcttttctccaagggacgaaaaaactctacattaacggtcagtttgtcacaagtcacgataacaaaaccttttcgactcctaacccagccacaggtgaaacccttattgatgtatatgaagcaggtgcaaaagacattgatgaagcagtaaaggctgccaaaaaagcctttcaaggcccatggcgctcaatgtctgccgctgaacgcgcccgcctcatgttcaagcttgctgatttaatggaagaaaaccaagaagagctcgcgcagcttgaaactttagataacggaaaaccaattaatgaaacaacaaatgcagatatccctctcgccattgagcatatgcgctattatgcgggctggacgaccaaaataagcggacaaaccattcctgtcagtcaaggttattttaattatacccgtcatgagcctgttggtgttgtaggacaaatcattccttggaacttcccgctgctcatggccatgtggaaaatgggtgctgcacttgcaactggctgcaccatcgttttaaagccagcagaacaaacacccctctctgctctttatttagctgaattagtggataaagccggcttcccagaaggtgtgattaacatcgttcctggatttggtgaaacagctggaaacgcattaaccgatcaccctgatgtaaataagcttgccttcacggggtcaacaagcgttgggaaactcatcatggagaaagcagccaaatccattaagagggtcacattagaacttggcggaaaatcaccaaatattatattgccagatgccgatttaaagaaagccattccaggtgctttaaatggggtcatgtttaaccaaggccaagtgtgctctgcaggttctagagtctttgttcaccggagtcaatatgatgaggttgtcgatcaaatggctaagtatgcgacatccctcaagcaaggcgccggtcttcatcaagatacgcaaatcggacctcttgtaagtaaagaacagcatgagcgcgtgttaggatatattgaaaaaggtaaatctgaaggtgcaacagccgttgtcggtggcgattgcccttatgaggctggctattttgtctcccctactgtttttaaagatgtagaagatgacatgaccatcgcaaaagaagaaatcttcgggcctgtcctatctgcgattccatacgattccattgatgaagtggtcgaaagagccaaccagtctgactatggattagcagcaggactttggacagaaaacttaaaacatgcccatgacattgctgcacgtcttgaagcaggcacgatttgggtcaactgctataatgtctttgatgctgcagccccgtttggaggatacaagcaatcaggtcttggcagagaaatgggatcatacgcccttaacaactatacagaagtcaaaagtgtgtggattaatctccaagactaatgacgcctataaagccggtgaccatgtcatcggctttttttgtgattgcatgtgacaggcagtctcctgaatatagtaataaaggaaaggagcatggccgcatatgcaagatttcaaaacgaaagtaaacgaatttattgatgaattgcacatgcaaatgctacgcagacaacgagaagatggcgcttttgtcttctgctttgaaggcccaatgatgacaaatgcttttttgattatgctgttaaaagctgtcggtgattcggaccaggcactcgttcatcaattggcagaagcaattcgcgaaaagcaaaatgaagatggttctttttctttgtatcatgatcaatcgggacatgtaacagcgactgtgcaaggctattgtggaatgctcgtttcagggaggtttcaacaagatgagccgcatatggaaaaagcagcacactttattcgatcaaaaggcggattaaaagacgttcattttatgacaaagtggatgcttgccgtcaatggcatgcacccttggccatacttctatgcgccactttcatttttactcatccctacatactttccgctgcacttctatcatcttagtgcatatgcaagaattcattttgtcccaatgatgattgcactcaacaaacgatatacctctcatgaacagtttccaagcttagcacatcttgatgcgaacatgtctaaaaatccttttgactggtttatggcaagagaagaacgttccactcaccactttctagcgtacatgcggtcgtatacagcactcgacagccgcctcgactttttcgggtatgaggcagcgaagcggtatatgtttgaccgccttgaaaaagatggcacgctgtacagctatttaagtgccagtatttttatggtctatgcactcatgagtcttggatactctccaggacatcatctcattttaaaagcagttaaagggatgaaaaagatagtcactgactgtgggggcaggaaatatgctgagaattctacatccacagtttgggatacagcgcttgtcagttatgcttctcagcgagcaggcagaacacaagaagatccagttatcgaaaagtcttttacgtacttattgaaccggcagcaaatgaagaaagcagattgggcgattcataaccggcatgcggctccgggaggctttggtttttcagatttgaacacaaataaccctgattgtgatgatacgcaaattgtgttaaaagccattcctcacacctacgcaccggttcagtggaaacgagggtttgattggcttctttccatgcaaaaccgtgatggcggcttttctgcttttgaaaaaaatcaagatcacttcttgcttcgtcatcttccgctcgaatctgctgaggatgcggccattgacccatctactcctgatattacaggtcgtgtgcttcatctcatcggtcttgaagagaacaacatgtcaccactcatgcaaagacaaaaagatcattgcgtaaaatggcttcttgatcatcaagagaacaacggatcatggtttggcagatggggcgtttgctatatttatggaacctgggctgcattaacaggactaaaggctgctggcatcccctcatcgcatcctgctgttcaaaaagcgtgtcgatttttaaaaacaattcaattggaagatggcagcttcggagaatcgtgtaaaagtgcagaggtaaaaagatatgtcccgctcccatttggaacagtggttcaaacggcttgggctgctgaggcacttttacaatatgagaagccggatcacacaacaattttaaaagccatctcatttttgattcatcatcagcactcgagtgaagccttgcactatccagtaggcattggtcttccaaagcaattttacatcacctatcatagctatccatttgtctttccaatgatggcttgttccacatttttagaagaaatgaggcgtaaaaatgaataaggaagaatatcgcatgcagcttaaagattggcttagctccattcaaggtgcagttcaagatgacaacatccgtcagaaaacagaacatttatcgttcatcatgaatgatgaatattccagtgaagaagagtggtacgaattggctgaaagtattgcagaggatatgaaaccactagaagcaatgcgagatgtggcagctggcgaccataaattacctccgctcccttaccggtatgatgcactagaaccgtttatttcaaaagagattatgtatttgcatcaccagaaacatcatcaatcatatgttgatggtctgaaccaagctgagcttgccttaaaaagagcgagaagaaccaatgattttaaaatgatcaagcattgggaacgggagcttgccttcaatggtgcgggacactatttacattgcattttttggttttctatgagtccttcaggaaaacgaaagcccactggacaaatgctgcgtctcattgaacaatcgtttgaaagctatgatgcattcaaatcccaattttcagctgcagccaaacaagtagaaggtgttggctgggccattcttgtatgggcaccaagatctcaacgattagagattttacaagccgaacgccatcaattactatcacaatgggatgtgatccctcttctagctcttgacgtatgggaacatgcctactatctgcaatatctgaatgaaaaagcacaatatgtagaccgttggtggaatgtcgttgactggcgtgagccagaagcacgactaaagcaagctcagcaagtgaaatggacccctttttaagacaatactccatataggcaaatgcttatatgggggtttttaattcaatttagtttacataattttattatgatcatcactataaagaatgggttgttttttcagaaaattcgtttaaaataaaaaagatatgtaaggaaagagagttgaaacaataaatgaagattcttttaactattagtcactttgcaggaaggacctttgcgatttgggtcattgtctttgcacttcttggatttgcctttcctgccgaattctctaagattggaccgtatattccttttttactcggtattattatgtttggaatggggcttaccttgtccgctgaagattttaaagaactgtttcgaaaacctctttatgttctgatcggggtgctgacgcagtacacactcatgccgcttcttgcctttttgttagcttacggactgcggcttccgtctgaaatcgcagtaggagttgttctcgtaggctgctgcccaggcggtacagcatcgaacgtcatgacctttttggcgaaaggaaatacagctttatctgtagctgtaaccaccatatcaacattgcttgcgccgtttttaacccctgttttcattttaatttttgcaagatcttggttacctgtatcaccagaggctctgtttttatccattgtacaagttgtcttaatccctattattttaggtattcttgtgaaattgttttttaaaaaacaagtatcgtatgcggttcaagcactgccgcttgtatctgttgccggaatcgtggtgatcattgctgcggttgtcagtgcaaataaagagcagattcttcaatctggactgctgatattggcggttgttatattacataatggacttggtcttttatttggttacctgatcgcaaagtggtgcaaaatggatatcccttctcgtagagcgatctcgatcgaagttggcatgcaaaactctggactcggtgcagctctagcaacagcgcacttctcgccacttgcagccgttccaagtgccatttttagtgtgtggcataatttatctggttcctggcttgcaacatattggtcaaaaaaaggaaatcctgagaatgaaaaagaaaaaaagctagcaccttaacgggtgctagcttttcaaattggagattatccttcaagcaatagctgctccggatcttcaagcaagtttttaatcgtgacaaggaatccaactgcttctttaccatcgacaattcggtggtcgtaagaaagagctaaatacatcatcggacggttttcaaaacgttcttcatcaattgccacaggacgaagctgaattttatgcatacctaaaattccaacttgagggctgtttaaaattggtgttgaaagcagtgaaccgaatgttccaccgttagtgatcgtgaatgatccaccttgtagctcattcagagacaatttgttatctcttgcttttttcgcaagatgaccaatttccttttcaatccctgcaaacgacaatctgtctgcatcacggacaaccggtacgacaagtccttcgtttgcagcaacagcgatgccgatgtcatagaatttcttcaagacaagctcatcaccttgaatttctgcgttaagcagcggatatttcttcagtgctgctacaactgcttttgtgaagaaggacatgaagccaagctttacatcattttgttcaaggaacgcatctttacggcgctttcttaagtccatcacagccgtcatatctacttcattaaatgtcgtcagcatcgcagccgtttgctgaacctcaactaaacgttttgcaatcgtttgtctgcggcgtgacattctctcacgttcaacaggctttcctggttgctcattttgcaccgcagcatttgcttttggcgcggctttcggtgcacttgcaggtgcttcattcttttgataagaagcgacatcctgctttcgtaccctgcccagcggatctacggttggaatctcagataagtctagtcccttctctctcgctagttttctagctgcaggagaagcgatggttctgccattaccagatttcggctcttctttcactgcttcttctttttgagcagctgccggttcttctttcgaagctggtgcagactcttgctcaggtgctggagctgcggactcgcttccgccagcttcacctgctgcaattgttccgatgacttctccaacttgtacagtgtcaccagaatccttcagcacttctttcagtacaccagattcttcggctgtcagttcgacattgactttatctgtttcaagttctaacaggtattctccctgctccacataatcgcccggctgctttagccattgggcaatcgttccttccgagatcgattccgctaattcaggtactttaatttccgccatttttcatttcccccttagtttttgcgagtcaagctatcagatacaattcgttcttgttcttttttatgcacagttggatcaccctcagccgtacttgaacgtcttcttcggccgatataacgtacttttactttttcaggcgcaatttcacgtaaatatggctcaatgtatccccaagcccccatattttgtggctcttcttgcacccatacgatttcttctaagttttttagtttcgataaaatcgctttaatatctttggctgggaatggatatagttgttccactctcgcaatgtgaagccaatctttcggctcttccatttgggtaaaacgatcactaatatcgattgataccttcccgctagatagcacgaggcgcgatactttttcgtgatcatgcacaaggcctggctgttcaagaactggacggaactgcccatccgttaattcctggacttcagacaatgtgttcgggttacgaagcagactcttcggtgtcatgatgacaagcggacgaatctcttcacgaagcagcattttcgcctgtcttctaaggatatggaagtattgtgctgcacttgtcaagttcgccactgtccagttattctcagcagctgattgcaggaaacgctctgttctaccacttgaatgttcaggtccttgtccttcatatccatgcggcaagagcatcactagacctgatttttgcccccattttgcgcggccagctgaaataaattgatcgaaatacacttgagccgcatttgcgaagtctccaaattgagcctcccaaatgactaacgtttcaggagaatagacattataaccatattcaaatccgatcactgagccctctgacagtggactattatgaacagtaaatgatgcgtttgcatcactcagctcatgaagagcaataaattcatctccagtttgactgtcgtgaagaacaaggtttctttgagcaaaagtaccgcgctctgaatcctgtccggtcattcgaattggcgtaccgtcttttaatatagatgcaaatgcaagtgcttccccaagcgaccattctactttacggtcatctgtaaacacttttgcacgtttttcaaggatccgcttgagcttaccaaatacttggaaatcctccggccagctgatcaattcttcattcagctttcgtaatacatcaaattctactgatgtatctactgctgggaagccatttgatactggttctggcagttcaatttcttgaatcgtatgctctttctttgaaggcaccttttgataggcttcttctattttcgtcgctacagcctgctcgatttcttcacgctgctctttcgttagaagaccttctgtaacaagtttatctgcaaagatattcttgaccgttttgtgctttctgactgcatcgtacagcatcggctgagtcgtagaaggctcatccatttcgttatgaccgaatctgcggtaaccgatcaagtcaattaagaaatccttcttaaagcgtttgcggtattctacagctagctgaacagccgctaaacatgcttctggatcatctgcattgacgtgaacaattggaatctcaaatccttttgcaaggtcacttgcatattttgttgagcgagattcattgctttctgttgtaaatccgatcatattgtttgcaatgatatggattgttccgcccacctgatagcctacaagttgacttaaatttaatgtttctgccacaattccttctccaggaaatgccgcatcaccatgaattaagatggctaatgccttttcaacgtcttgggctggataacctttttgagtacgtgtttcctgagcggcacgtgtgcttccttcaatgattggatcaatgaattccaagtgacttgggttattggcaagcgtgactcttgcactctttgtatcttcgtctttaatttggcgatctgctccaaggtggtactttacatcacctgtccacccgtagctgatgccgatagagccttctgatggaacaagctctttatttggcgcatgctggaattctgagaaaataatctcatatggttttcctaacacatgtgctaatacatttaaacggcctctgtgtgccattccaatgttaatatttgaagtcccttgtgtaacagactctgaaataatttcatcaagtactgggacaagtgcgtctaatccttctattgagaagcgcttttgcccaacaaatgttttatgaagaaactgttcgaactgctcaacttctgttaatctcttgaaaacagaaactagtttatccgctggttttttcttaaatagttcaccagactcaatcgattttgagagccagtttcgttcttcgaaatcatgtacgtgatcaaactcaaatgaaatggtacgcttatacgtatttctcaaatggttaatggcttctatgccgtttgaaatgtgttttggtgcgtcaggactaataatagatattggaatattcttgacgtcttcttctgttaaaccgtactcctttaaaggaaacagctcttgtaattccttttctttgcgaagaggattgacggaagcatttaaatggccatacgttctgatgtcttctgccagtttaacgactgatgctatcttttggatttgttcagaagtaactacgctattttcttttttcccaatttcctccttcatttcactcggtggtgcaccaagttcatcaaatatgcctcttagatcttcatcaacactagtaggatcctggacatactgatcgtagagctcgagcacatagccgaggttcggaccatgaaattcttcccaactcaacggttgtttcacatcattttgaaacattttgaacactacccccaactttgatcatcaagtgattgaacactatctcgatataacttccagaacacaatgaccaaatttatgtaataaaacgcttccaataatattctaccactgtttcggattactttctacattctttgttcaattaaagataaaaaattcacagaaaaacaaaaaatttaaatcattccgaaaaatattttgaaaaaaggggcaaaaccttatgccccaatgcttttatgcagtaattttttcagtaatggatataaaacatccggcaatgtatcgacatctggtacaaaaatgctgaacttgccatacatatcttgaatggtttttatctgtgcttcttcgatcggcgaattggataaaaacacattgatcacctcaatgccctttttcctcgcctcaagaactgcttcatgtgtatcgacgatcccattttgttcgtagctgaaggcagctggctctccgtctgaaaagacaataagaaacttttgctcttctcttcgttttaaaatcatttttgtcatttggcgaatcgcatagccatcccggttatcctcttctggttcaagggacataatggaaggacctgcatcaaataaagaatctttgaacgacacgaccgtgttgaaatagttcggctgactggtttcggttgcgtcgtttgtatcttcccaaaatcctacaatttgatgtgggacttgaacggattttaacgcttcatgaaatagaacaattccttttttcgtctcgtccatcttgtcaaacatgctggcagaacagtctactaataaagtgaaaacagcatcaatctccgaagaaggtgcctgttttttatagaaaagacgcgggttagactctgtaaaataacgaatcagctttttactcagacgccctgcatgaaggtccgtttttggccatgattttttgtgttcgagcgttttttgaatcatctgttttaagcgtttctgataaggctcaatctccttagcgtgctgcttgtatacatcgatttgttctggcgcgggaggatcaggtgaaatcatgactggaaacgcatatttgttctcttttccattctcatgagcatccgccccgctttcttccccttcagcctcttccagcgcctcaagctttgaataatcttttcggtatgtttgcttggcagagccttggacagtgccgagtgcttgatctccgtcatcgccttctcttgctgcatccttcccgagatcacttttaccgccgtgctctaaatcaaattgaaggaagctttttgacggcgcttctgtttctcgatgccacacttccatatactcctggtggatatcttcatcgccctctttttcccggtcgactttgatgtcctcacttaatttaggttttcttttcaagtcatgaaacagcggttcttttgccgctttttcatagtccaattccgggaagaaaaagtacgtattcagcatatccttatcaagaagctcatcaaagccttccattaattctttgacaatgactgcgatatctccggttgaacccgcttcatatacacgctcaagacttgattcaacaaacggaatcattgggttgatccgctcgtgtagaggcggaatctcttccagcggcgaatcagctgtcagcttcacatacattgcacaatagagtgcatccgttagaatgcttcgctcttggttaattgttaattgcgtcttaaagtgtcgccggtacagctctcttcttcgtttaaatacctttttggttcctgggcgatcgcgtttaattcgctcttcaatccggatatcttcaaacagcataaacaattgtttacatagatcaggaatggaaattgtatgggcatagcgaataatttcctgaaagacagtcagatcactataaacggttcctactgcacggaggaacacatcactttttagcccggctgtcatgtcttcttgtttacgatcatcccaaaaatggctgatgaaaattttcttttcaaaaggctcatagtaagaatgcactccgtattcaagctcgacatcatcactttttgctaacgttttagctaaatccgttaattccataaataaaaatgaatcgattctgctgtcattaaatttgatgaatttcaaaagtcagaacctcactcgaataatgtttgggcaatatttcttaccgctgctttttcccggtcatcttctagcttttcaacaatccctcgttcaactgcacgaagcggcgggatgtattgcgcaagatcacatgtgtctaggagtgcgcgaatagatgcagcttcttcacttacctgcccgttgtgcgcctgtgtaatgaggtctgatgagagctgcacgaattgatcgattaaccgttcatcctttaatacagattgagattgcagtacatcctttaggataccgccgccaatatatggaacgtcaatcacaacaaaacggttttttaacgcttcatttagaggcactgtgccgacatagccttcattgattgccgcaatcacgccaaagccttcatctgctctaacgacctcgcctgtaaatgggtttgtcatcatttttctgtagtcgagtacgccgtttaaaataggcagtgtttccggcttcgccatgttgatttcatcaatatataaaagatggccttttttcatcgctttcgttacgggtccttcaataaattcaatagaagcaacttgaccatcattgtgaatggttttatagccaatcaaactttctgcatcaagatcaaccgagcagttcacactatgcatcggctgctgaaagaaagcagataaagtttctgctagttttgttttacctgacccagtgggcccctttaaaagaacgtttttgccgagtgctagtgcaatcatagcatcttgtatgataaacgtatcctgtgattcatagccgcctgttccaataagcggacggaattcttcttctagtccttttgcttttgcttcaatcattgcttgaatttcttctgggagtgattgttcgttaaacatttatgattaattcctctcttcgatcattttcctcaccaagtatactaaaaaaacctttatgcactcaatacataaaggctagacatctgttattttaccatttcttttgtaatcgctccgcaagcgatgcgtttccctgagtttccagaagggttgcttaagtaatcatctgcttctgcatgaatgataaagctccgcccattatgatcgattaattggtttggacctccctttaacgtcacatctggtacattcacgacaacatcaatttttccatctgccccaacttctaaattaggcatatctccagcgtggtggccttttgggttatcaaatccatgctcccggtgtgttggattaaagtgagcccctgccgtttcaaaatctggcgcttcacatactcctgtttcgtgaatatggaagccatgaggacctggcggcagatctttcgctttcacatgtaaatccagcccattttccgaggaatctcttacttcgatgctgcctattttttgcccgttttcattgatgagtgtcgtgataaccggtgcttgtttaggtgctgcaacctcgctggtttcttctgtcgtttcttttttcggcggtgcatgacatgctgttgcgacaaagaccagacacatcatgatcatccacactgactttttcatatgactgcccccttttgatatcagtatggacaatctgatcaataggcaaacaaaaaaagccgaaaatcggctttttttagaagaaacgttttgcacctaaataggcttttttccaatatgggttgcttaagttcgagatcccaactccgctgtcacttgcatgaaggaaatctcctccgccaaggtatagtcccatatgagatggacccgctttgtatgttgtgaaataaacaaaatcgccaacctgaggtgtgctcacaggtttcatcatactccagtagcctgctgtgcttaatctggatacagacgaaactttattaatgaggtaataaacaaagccgctgcagtcaaaaccagatggtgtattgccgccccatctgtaaggaatgcctgtcagctttttcccttcttggatcattgtcgtgatttttgcattcatcggcacatcatttttgttattattggccggagttgttgaaccgttagacgtagaaccattcgacccagttgagcctgaagctgcaccattaatttttagaacttgtccaattctaagcacatcgctttttaagctgttggctgtgcggatggattgaacctgcactttaaattgattcgcaattttccataaggaatcgcctgattttacagtataagatgtcgctttcccgcttgaaggcgggttgcttggtttagcaggtgctttcggctgacttggttttgatgcagccgtcccttttactttcaatacttgattcggataaatcatatcagattttatcccatttaatgttttgatttcaccaatcgacatattgagcgaattcgcaattttccagagagaatcccctaatttaaccttgtatgtacttgatgaggatgaactatttgagttcgttgtcttattgtttgagctggaatttgaagaggagtttgatgactggcccccgcttgtcttcgtacttccagatacctttagcttttgtccaggacgaattaagtcactgtttaagctgtttagactttttaagcttgcgactgacattttatgattttttgcaatgagccataaagaatctccaagctttacagtgtagcttgatgtcgttgaagcatttgatttcgttgcttttgatccagttgacgagctggattttttgctttttgcgccaggaattttcaagctttgtcctgcaaaaatcatcgtcgtttttagttgattaagagattgaagttccgaaatacttgtattgtactgttcggcaatcttccaaagtgagtcaccgcttttcactttgatcgtctgtgcttctgccggtgcagcaaacacagctgagccagcgatcgctgaaactgtgaggccggttactacttttttcttcatagatgaatctccgcctttcatatttcattcaataagacttatgtactagttttgagtttagcatttaatggttctgcttctcttgcactattttatctttatttctattatattactcgacatgtagactttgggcaataacaaataggctaaagcagccaactcaaaatgctaaaacaaagccatatcgtttctatcggcagtttgctgtatttataaacattttttaaggaatttttaagttgacgtttagaaatttgtcaaaacaagcacggtgctagtttcatagttctattctacatgacaaatttttctgtatcaaatgactttttactcaattggctgttttttctcctcaaatgaaaaaaagcatccttccgaatgaagaatgcagcgattcatttttatttccttatttcaggttcttttacagtgagcggataaaggactccttctttcgcaaacgacatttttcccgtttcttctgatacgacgagaacaagtgcatcggtcataccagagagtccgatcgcggccctgtgtcttgtcccgagagaaggattaactttttttgaagtaagcgggagcacatttgcagcagatacgagtgtattctctttgactaaaagagcaccatcatgaagtggatttcctgggtagaaaatgctttctattaatgaagcactaattttcgcatgaagatttgtccctttttgaataaaatcctcaacctcatcacgcctttgaatcacaataagtgccccgtgtttttgttttgataagttctcaatggctaacgaaaattgagcaaatccaggtgtgaattcttccatatacgattgcaaataaaacgaggaagcctctgcgtgcatttcattaaactcatcatgtaatgactcgagatcacaaagtagacattgctcgatctcatcaagggaatcaataatgtcacttgcatccttcatgattttcatcaagtgtgttctcatgtccactttaaatagcgcttcttcattcgtacgattgatcatttgaccttttccctcctccttttgttgtcataaaataacaaattatgcgcattctattgatatggaggtgacttaatatgaccattcagaaagtgattcaatatgcttgcagcattttaggtgttgtcagtctttcctttatttatgcccaaatgtttaaaaaaacgaagccatctaagaaaaataatccgacggagaattgatttttttacatagcatgatataatcctctcgttatttctgttcagagaggaacttatgatgagagaaacaaatagcattcgagctaaggtgacactatttttaaccattttgattccgattttaatcactcaagcgggtctttcgcttattacgtttttagacaccgtaatgtctggaaaagtgagtgcagaagaccttgcgggtgttgcgatcggttctagtatttggacccccgtttatacaggacttgccggtatattaatggccgttacgccgattgtcgctcagctgatgggcgctgggcataaaaaagatgttcccaaggctgtctttcaggcgatttatttatcctttcttttaagtatcggtgtgattgcgattggtacaatcagcatcccttacgtattaggtggacttggacttgagcaatccgtagaggatattgcgcggcattttctcagttttcttgcttttgggatcatcccgctgtttggttattcggtactcaggtcatttattgatgcattagggaaaacacgtgtgacgatgttcatcacgttaacagcacttcctattaactttgctttaaactatgtatttatttttgggaattttggctttccaaggcttggcggtgcgggagctggccttgcatctgcgatgacgtattgggccattttcatcatgagtatttgtattgtcatgaaagcagaaccatttgcctcatttcgtttgtttcaaaaactgcctcgaatcaatatctcccgtatggggcaaatactaaaaatcggtcttcctattgggtttgcgatcttttttgaaacgagtatctttgcagctgtcacgctgttaatgggtcactttgatactgtgacgattgcaagtcaccaggctgcgatgaactttgcttctatcttatatattttaccgctcagtatctcaatggctttaacaattgtcgttgggtttgaatccggtgccaagcggtataaagacgcgcaaaactacagctatatcggaattggaacggcggtattattctcattgtgtacggcggcactcattttgttatttagaccagagattgctggtttatacacagctgaatcggctgttttacagttgacacagcactttttgatttatgcgatctttttccagctgtcagatgcaattgctgcacccattcaaggggctctgcgcggctataaagatgtgaactatacgctcattgccgcatttgtttcttactgggtgatcggtcttccttccggctatttgattggcacctatacctcatttggggcatttggctattggattggtctcattgcaggacttgccgctggtgccgtcgtcctctttattcgtctcagattgattgaaaaacgcttgcttcagcaagcgcccaatcactaaagacgacacaaaaaaagcagctgatcgatgtcagctgcttttttatttagtcattccattggtacgtccagaaaatttcttcatcgaaccatttttggacgacaggttctttgtttttcagcttctgttcaagctctctcagcatgccttctgtttgcgttctatgcgctctcagtgcatttaatttgatatctgctacatctgtaatgtcgatcataatatctgcatttcccagcacttcttctctatttctcgtaatggccatgcagtatgtgacaggacggtcatcttttttcttgcggtatagagcacgaatgacagcttcgcctgtcgcatcatgatcagggtgtacaccgtgtcctggataaaacgtcacaatgagtgtcggtttgacttcatcaatgatgttttccatcacatcagctaaatactcgtcgtcttcaaattccaatgttttatcacgaagtccaagcatacgtaagtctgtgatatccatttctttgcaggcattgattaattcctgttttcttaattcaggaagtgtttcacgattggcatatgttgggctgcccatatttctgcccatttccccaagtgtcccgcatgcatacgtgactgggattccgcgttttctgctttgtgcaatgagacctgcaaccccaaaggattcatcatctgggtgaggcaacatcactagtacatgttcgttcatgactcgtcaccctttcttctacacctgaaatggtgtttcactaatttgtaatgagatcgctagttttccgtctggcaagtgccctgctaacagcaggcggccatggtcatcaaacacataatccgttaatccttctgcgtaaatccagccatcttctgttttcattccaacacggtacggaccttgtccttttattttcgcctgtgaatagacgactttcgcatttcggatatatgccacgaccgtcatattttgttcatttacatgagctgaataagaaccagttgtcgtttcaagatgaacgaaaactggacgatttaaaaacgattcaagatgtgttgtgacatcttccgtttgaattggtttcatgagtggttccttccttcattttgaattaattctcgcagcttttttgtatgtaagctgatcagctgcagctgatgatcatgctcaagctcactttctaatattctctctacagcgagcacatatttttgatggaatgattttctcgcccgcggatgagtgcgcgcatcgcttaaatcatcacatatcgcctcgagtaaagaagacatatcatcgacatcaagctgacgatttttccataaagattgataagcggctgcaagctcattggcagatgacatgtaatcacctctacagttttggtaacaacttattatgacatgatccgcattcaaaaaaaagcaaactgcttgttccacttaatgagaattcgctgtttttttcatgcgtaattgagaggtagtaaataataaaatcgccacccagatacaaagaaacgtcacgattttagctgaagataaatgctcgtgatacacaaataaccccaaaaacagcgtaatcgtcggtgcaatgtattgtaaaatgcccacttgataaagaggaattctttttgcgccttcagagaataaaagaagtggcaccgctgtaaagacccctgcaaagaataagagaccaagcgatccgaagctgttaggattcattgtcaccacaggttcttttaagaagaacaataagtacacaagggccgccggggctaaaagcagcgtttcaattgtcaatccaattgcactcgtgaagctcattctttttttaatcaatccataaaaaccgaagctaaaggcaagtaatatcgcaacgacaggaaatgaaccgtactgaatcgtggaaagaatcaccccagtggcggcaattagtatcgcaatggtttgtaatttattgagccgctctttcaagaaaatgatgcctagtaaaacagagacaagcggattaatataataccctaaactagcttctagcatgagatggtgattgactgcccaaatgtacacataccagttaaccgaaattaaaatagcagataaaagtagtgaaaaaagtgctttaccatccagcatgagacccttcactgtctgcatcgccggccggacttgttttaaatacagaagaataccgcacataaaaacaaatgaccataaaattctgtgcgctaaaatttcgcctgacgaaatatgctccatcagtttccaatataaagggaatagtccccataatgtaaaagatgctgccgtatagagaacaccttttgattgttgctgatcgttcaatctaaccattcctttctaaacctatcgtatattatagcacgcactcaggtgaatgggcatatactaattcagggcatttagaaaggatgatttgcatgtttgactggaaccgattattcccttttcaaaagcaattttcaaaagaagccttaaagaattcagaccctaaagacgttgagcagtacgtcaatcaagtgatggaaagtgtattcggctccaattatcctgctcaattcccttttcaggacccactctctcaacatcaaaaaacgaaagaaacagacgtcaaaaaagaaaaagaacccgaagtggaagtgttcgaaaccactgatcacgtgttcgttaaaattgagcttgctcggccgaacacagaaaaagtaaaaatcaaacatacagccaacctgctgtttattgatcattttcctgaggaaggcacgcagaagaaagttgtccttcctgctgctgtaaaaagaaaaggaacgaaggcttcgtatcaggacggtattttggagattatgtttttaaagcatgatgatccggggatctctgaaatcgatattccattataaaaagcctgctttcatatagaagcaggcttactcttttttcttaatagtatggtggatatccgccgccataaggtggtggagcaggcggtggtggcgggtaatatggacggggataattaaaaatcgcacttcctaaaaatccgccaagcagtccgccgactaaaggagcgccaaaaccaaaaaacaaagggactctggattcatatggcggaatgccaggggcgccgcctcggaaatacggagtatgagggtacatgcatttctcctcctttgtcatgtgcctaacatcagcatattcatcaggagtcaaaacgtttgggcaaacctgaaactaggcttgctcctttttttcatgagattctgtatactcccctgcccacctagatacctcatgaaacacattatttagcgcatttcctttttcagttaaacaataaatgactttaacaggcgtctcaggcagaacagttcgctctataatcctttcttgctcaagttcttttaaacgctctgcgagcattttttgactgatagatgggataatgtccgtcatgtctttaaagcgctttggaccatcaagcaatacatgaataatgagaccattccaccttttgcctagcagtaaaaaagcttgctgaatgtgtggacataattgaaattccataaatttcagcctttcttttcatgattgtttgacaaactaacggtatacaatttaaaatagctctagttacaataagtaagtttctcacttttttagttattgtaccatactatttgcaaaaacgggaggaaatatccatatggcgactgatcaaaaaacaattgacattttaaaacaaagagcttcagtaaaagagtatgatacaactcatgaaatgacaaaagaagagttaacagagcttcttgatatcacaactaaagcaccatctgcgtggaaccttcagcattggcatttcactgttttccatagtgctgaatctaaagcgaagttacttccaatcgcttacaaccaaaagcaaatctcacaagcatcagctgttattgctgtactaggtgatcttgaagccaatcaaaatggtgaaaaaatctacagtgagctggcagaacaaggcttcattactgaagacatcaaagaaacattgatgactcaaatcaatggcgcataccaaagcgagcagtatgcacgtgaagctgcgtattcaaatgcttcattagctgctatgcaattaatgattgctgcaaaagcaatgggctatgatacatgcgcaatgggtggtttcagtaaagacgccttcatcaaagaattcaatgtaagcggacgttatgagccagtcatgttgatttcagttggtaaagcagcgaaagaagctcataaaagcaatcgtttcgacatcgaacaagtatctaatttcctttaaaattggcaaggcctcagctttcatgctgaggctttttttatttggtttaaatattattcctacatactttcttttcactttaccccttttcaccttcaccctttctcctttttaagaatgaaagcgttatattagtatgatattcgccaaaatgattgttttttctgaaaatggtcttgtgatctaatctgacaactgctattattatgaaattacaaaaaattcaggagggaatcatgaataaaaaattgatactggcactacttatagcgattccattcatcggacagctcgcactgctgccctttgcaaatcgtattcatccatttgtgatagggctgccctttttccacttctggctcttactatggattgttctcacaccaatctgcacattcatcatttaccggatgcaacattcaaatggaggaactgactaatgcaaggaaatttaacagctttattgattactgcaagtattattttcatcgtcgtggtcatcggatttgccgctggccgggataaatcatcgagacagtcagtagaggaatggtctgtcggcgggagaaaatttggcggtctgctcgtctggttcctcgtaggcgcagatttatataccgcttatacctttttagggctcactagtacagcctatacagctggaagtgtcgcttttttcgctatcccctattcagttctagcgtattttattgcttatttcttcttaccaaagctatggacggttgcgaaaaatcacaacctcacaacgctcgctgattatgcacgtgagcggtttgacagcaagctgttatccagtttgattgcgattattggagtacttatgctgattccttatatttgtcttcagctgagcgggattcaagatacgttaactgtcgctggtactagttatattaatgtgaatgcagttgttattatttcatttattttagtcgcactttatacatttttcagtggtattaaaggtcctacatatacagccattattaaggatattctcgtttgggtcatcatgctgtttatggtggtttcactgccaatcattcattttaacggctggaccccgatgatgaatacgttagctaaggaagcgccacagcttctgacaattcctgacggcggtcctaaaggcattttatggttcattaccgcttcaggcgtttctgcccttgctttgtttatgtgggcacatgcggcaactggggtttttacagccaaaagtgcagatgccatccgtaaaaacagtatgtttttgcctctttataacatcgtattgattttggtcatcttccttggatttattgcctttttagtcttacctgaagatacaaatccaagatttgctcttcttcatttaattcaaacgtcatatggtggtgtgatgcagggcctcgcttattcaacaattgcactggcttccctcattccatgctcgatcatggccattggcgcatcgaatttatttgccaataatttataccgtgacttaattcatccgaatgtatcaccaaaaagattgaccatcattacacgttcaatggtgtttatcgtcatcggactggcccttttattcgggatgctcttcccaacagcacttgtgacgcttcagctcattggcgtttcaggaatggttcaaattttcccagccattgcgatcagcttgttctggaaaaaacaatcgagagaagcaacgattgcggggttagttgttggcatcatcgtcacctttacagccaatatctcacaagtcacgttcggtctttatgaaggttttctcggtttactagcaaacgttgtggtcatcttgatcttgaatccattcttccaaaagcatgtcacagacaattctgtcataaatgatctttttgaaaaagataacgaaaaaacagaagcgactgtaaacaacgcgtaaacataaaaagagcagtcccccttatgaggactgctctttctttatttcatttcttttttcaaaacttcaatggcttttttcatttgtgtatcattgttctttagcttatcttggatctttgtcatcaatactgtcgttgtatctcctgtcagaataccgtctgttttcagatcgttgtctgtttggaagcgtttgacgatagactggaaagcttgatcgtactcaccatttgcttttgctttgtagccaagcgcttggaacattttttgagccgctttgacttcatctccattgtcattcagctgatacgattttttcggacttaagtatggcagctttgcataacttgggagcgatgctttgacctgtggttcaattccttttttgtgaatccaagaaccatccggcgtcagccacttggcaatggttaacttgacgctagaaccatcattatagctttgtgcattttgaacagttcctttaccaaatgtcttttcaccaataattttgatacctgaagattggtgcagagccgccgccatgatttcagcagcgcttgctgagccgccatttacaagaacaactgccggctgatgaactttacgttctttttcagccttgtactcttctttcttccctttttcttcaacttgcatgatgactttccctttatcgataaagtcattactcatttcaatcgcttctgtcataatgccgcctggattatctctcaggtcgatgacaaagccttttgccccttttttctcgaggtcatcaatggctttatctagctctttcgatgttgtttcagcaaaggacgtaatttggatttctcctattttgtcttttgtgagttttgcatacaccgtttcaagcggaatggtgtctcttgtgatcgtcacatcaacattgcccactccttggcggttaaggtgcagcttgacatccgttccttttttccctctaataagagaaactgctttattgaccgacatgccttttgtgcttttcccatccacctttaaaatacgatcatgaggtttcaacccggctttttcagcaggagagcctttaatcggtgcgacaattaaaatttgcccatccttctcttctacttgtgcaccaattccttcaaatgatgatgaaatggtgttgttaaatccttcggcttcctcctgatccatatatgtagagtatggatcatcaagtgatgcaatcattccttgaatcgcaccatctactagtttttgatcatccgttttttcgtaatactcatcttttaccttcgtatacgccgccatgagtttactaaacttctcgtctcctgagacactgacagccccttgttttgtgatcacaaatgtaatcgcagaggacagggccgctgtcaccagaatggcgatcacgaacttaaattgttttttcaaaaaaacaccacctttatctcctttcattattatcaaggacgatgcttcatccgtcaaccaaaggatcgaagttctctttgaaaagataagccatttgaccttgcattgcataatctttaaagaggaacttgataaggaaagaagggattttatgagtgattatgtagaaatgcttgcctattttggcgtatccagtgcccatcctggcggaattgagttaacaaaaacgatgcttgagcatataaaattgacgccggatgcacgtatactggatgcgggatgcgggacaggacaaacggcggcatatttaggaaatatcggttatcaggtagaggcgattgatacacatcctttgatgattgaaaaggccaacctgcgatttgagcgagaagaactgccgatccgcgcattgcaagcatcgattgaacagctgccatttccagatgaagcgttcactcttctcatcagtgaatctgttttaagcttcacaaaccttcctgctgcacttgctgagatccaacgagtgcttgcccctggaagtcaaatgatcgcaaatgaagctgtgttaaaagcaccccttacaccagaggagctcgccaccgtacgagatttttacgggttccactcactcttttcacttgaagaatggaaggagcagctaaaagcagcaggattccatgactttcgcattctctcatttgatgaacacatggtacaggaggagccgacagaaatggaattatctgaacacatcccgccttctctttacgaaacgctgcaaacacactacgatctgattcaagcgcaccggaagcagctaagccacattctatttgaatgtaccgtataaaatgagcgaatctcctatatgttttgtccaaactctatgaggtctctcgcataggataagagtgaaaagagtttgtcataaggaggaaaaatatggagcgctatcaaaagctttgtcagcagcacatgggaaaagtcgctagaatcacagatcgtaatggcagagtacatgtcggacgcattgagcgggtgacaaaccgtaaagtgtatattcgtccagtcggcggttctcgcggcggctttggctttggttattacggagggtactacggctggggtgccgcttatggcatcgggcttggtttcattacaggtttcgcattagcaggattgttctttttttaaaagaagaataaagaaggccccccgaatagctgggaggcctttttatttgattagattttcttcactttgttcatgtactcttcaaatgttaaatcgtgatcatgcatcgcttttgctgcttcttttccaacatagcgcagatgccacggttcatattcatattttgtaatatcttcttttccttttggataacgaatgataaaaccatatttataggcgtttttagccacccatttgccatcaggtgtttcaccaaacttttcagagatgtcaaagccggcactttttgaggaaatgtccatggcaaggcctgtttgatgttcactttcgcctggtaaagctactgcttcctgcgctttgtctttgccttttaatttgacttcactatcaaaaatgactttttgacggtcataggagcgatagccagatactgcagccagctcgaagtttttctttttcgcatctttgaataacttctcaagtgcttccgctgcttctttacgaatatatcgtttttcaatatcctctgaaaaagagaattctacttttggtacaacgagatcagaaggtttataggttcctggtaatgcgtattctttgttgacaagagctagcacgtttgcaggattttgaatggttttcaacccacttaccaccttgatgtcattgaaatattcactctttaatgtcagctcttgatccgatgaatctgctgtattgtttgagttttgctgggtagatgaatttgctgcgctcttttgttcgtttgttttgttcgattcagatgtaccgcttttttgatccagcaactggcagcccgatagtgcggctgtcaaaccaagaatcgatgcgattgagagtattttatagcttttcttcatgacataccttccttttgctcttctaaaaaaaataaagatgcgctacatcgtagcacaccctttatactattataaaagagagtctagtgcaattaagatcatttcgtcaaatgtcgtttgacgctcttcagccgtcgtttcttctcctgtgagaacatgatcactcactgtcagaatggataacgcttttcgatcaaattttgctgcaagcgaataaagagctgttgtctccatttcaatcgctaggataccgtattgagccatgagttcaagtggtttttcattgtaaaattggtctgctgtaaatacattaccgacacgtacagcgacattttttgcttctgctgtatcgtaggctttcttaagcagtccaaaatcagcgcaaggtgcgtaatcaatcggtccaaacgccacacgattcatttgtgagtctgttgaagatgtttgagctaaaatgacatcacgcacgttgacatcccttttgatagccccgcaagatccgacgcggattaagttttgaacatcatagctttgaatgagttcattcacataaatcgaaatagaaggtacgcccattccggtaccttgtacagaaacgcgctttcctttgtaggttccagtataaccatacattccgcgcacttcgttatagcattcgacatcttctaaatatgtatctgcaatatatttcgcacgaagcgggtcgcctggcagcaataccgtttctgcaatttgtcctttttctgctccaatatgtacactcattttttagcctccacttacgtttactatgtgatttatcctatttagtataaacgattgagcctaaaaaagaaaataccagcttaagctcaagctggcatcgtcaatcatctatttaactcatcgttatcagtcgttcactgcgtttccatcctgccggaaaaagctgataatagcactttcctttcttcttatcatcaatcacaacaatatcacctgttgtcataaaccgtgcattgtaatcattagggactgtatcatgtacattaaatgtcgagaatgctttttccagaacatccaggtgtgttctgccgccaatctttgtccggtacacaggctgatgcccgcttgcagcgccatattcaggtgtctgataaatggttaagtgaaatgctgaaggtttcttttgaaaaaatctcaacgtcaattgcattcaaatccctccccttttatataaaattggctggggtctgtcaatttccttcttctatttttgtcgaatgacagacaatttttcgtcaatctttttacaaatgagaaataaagcaagtcctatcgcaaaaccgcctgcaacatctgtcaaataatgaacaccgatatacattcggctgatcccaatcaaaagaacacagaaccccgtgatcaagtagacgattttttgtctttctttcagccatggaatcatttcaactaatagataagctataaaaggatagattgtggctgcattcatcgaatgtccgctcggaaagctgtaatacgtttcattgacaagatgatcaaaggccggtcgctctctagcaaacagtccctttagttcatgattgatggttttttctgtgagatataatagaaaaagcatcatgatagagtaatagcgcttatacatgaatagtacgacactaaaaatgagcatgattgggacgagcagcgcactaatgccaaagtccgtcaaagtcagcatgacatcatttaaaaaagggagtctgatgctctcaaaccataagatgatctggttgtccaattcttgacccgcaccagataccatgagcgcagcaatggcgccaaataaaatcaaaagaaataggatatacacgcgaaagattctcctccctctctcttcagaatctcttcaaagtatagtgcctaccacgcctcttcttcaactatcattgcttttttcagcatatattcaaacgtaatgtcagccagctcaaacgtttccagctcagcaggtatgtaccctcttttgaccagctccatgtagaagaattccgcaatttcctctgtatcaatcaccaaatctgcttctttcattacattccgcctccttttttatgatgtatgaacgacgcctgttttttattacagtttgtcataatggctcattccatacatataaatgcagtaaacaaaaagaaaaggggtttgaggcaatgaaatggttaagcatattagatggagaaacgtttgatcaggtgatgggccgtatcttgaggggatggttttatgtgattgtttttttctgtgtgccttattttttattcgtgttaggacaagtctttctttaaccaaaatgctcgtgtaaactttccaatataaaatccatcatatctttgtattctggatcttcgaaaaattcgtagagaattttatagtcattatatatatcaagaagctcatccactatagatacagcgaggaattctagtgaagcttcgctttcttgtttctcttctaattgtaatagagccgtttgaaccatatcttcttccatttcttttgaggtttcaccgacgtaatgcacaaaaagaagctgatgaacgaactggtccatctcatacttcctcaggacaagcgttaagtcttcctcttctgtttccagccactctccgtcctttagcctcgtgagttcgtaaatgacatcttcccagccgtcatcacggtatcgccatatttcagtccgatggccaataattttaaatagctcttttccgtaatcttttacatatacaacatcgccaatgaggaactcatattcaatgtccagcttttctgtatccacaatcaccccgtcgtactcatcgtaaagctgaagtgatgtttcaaaataaagcacctcattatgattgacctcatacaaatagtgctggtcaatttgatggacttttgtaatcgttccgactgtgccgtacatgacaacgacgacaatatcccctacttgatattttggtgctttcgccttcattctgtctcccccttgcccgacttttggtcttaacgtatcgtatgccggcgcaaggaattctgcatgggcaaccacaccatgcaaaacgccattttatttctcataaaaaaaaccgcttctcccatctggaacaagcggttgtttgttatttttttttgacttctacttcatattgctcaaacgcttcgtcaaatgttgtcattgagctcaaataatcgccatttaattctaaataggcacacagctcatgataatcagtggacgctttcgggaagctgtgatcctcataagcagcatttgcaaaatggctgatttcatctttcggttttggatgtctgtacttcattaaataatggtaaaacgacttcacctgtttttccctccgcgacactctattttgttgttatattatacagcaatttgatgacttgtataggcggaggtacaacttatgatgaaaagtcaaagtaatttcgctttaataaccgctccatgctcattaattcttcgtatgaaattttttctggaagttttgtctgatccactaaaattaattgatcttctatctctttgaccgtctcatccttttgatataacatgccgcagtgcgtgcaggaaatggacggtgtttcgatgatttcaattgattgtgtgccagtgatcagttcccaatagactgttgtctgctctgcgtttgctttgttttcctcacaccaatcacatgtcagcaaggtcatttctcctcctttacagtttgatcttttttgagctgtgcttgatattttttctcttttaattcatctcgtttttcacgtttgtttttgagtgtgtcatgctcaggatttgtctcatatgcttctcttcgtttcatccggcttaaattctcaggcgtaaacgatttcgcttcatcctgaaatagtgcggtaacaccaattgccggttcttgtttctcttcataaatttcattaaaatacgcatctgcctggcctgccacgtaatgctctggttcagggtaagaggtgatcacaccttcaaagttacgaaggacgactttgtcagggctttgcgataataaataatttggctgtaaggcgatctttcctccgcctcctggtgcatctacaacaaagcttggcacggcatacccgctcgtatgccctcttaagccttcaatgatttcaagaccttttgatactggtgttctaaagtggccaatcccctcagataaatcacattgatagatataataaggtctgacccgtatcttcacgagatcgtgcatcagcttcttcataatcggcacactgtcgttaatacctgcaaggatgacagcctgattaccaacagggacgccggcattcacaagacgttcgcacgcttctttcgcttctttcgtaatttcaatgcttgtattgaaatgggtattcagccaaaccggatgatattttttcaaaatctcgcacagctcatctgtaatgcgctgcggaaagacgaccggcgcgcgggttcctatccgaatgatctcaacgtgcggaatgtctcgtaagtttttcaaaatgtattcaagcacttgatcattgattaagagcccatctccgccggaaattaacacatcccgcacctcaggtgtttctctaatatatccaatggcagcatctaactgcttttttggcacgcccataccgatctggccggaaaaacgtcttctcgtacaatagcggcagtacatggagcactgatttgttacaagaaagagcacacgatctgggtaccgatgcgttaaccccgggacaggtgagtcttcatcttcatgcagcgggtcttccaagtcatattttgttttatgcagctcctcagcgattggcacagattgcatacgtactgggcatcttggatcgtctggattcatcagtgaggcatagtagggtgtaatgttgagtggaatggttttggtggaaatcttcaccccttctctttcctcttctgttaagttcacgattttctctaaatcttcaagcgttttcacggtatgcgtcagctgccaaatccagtcgttccacttttcctcaggtacatccttccaaagctcaatgtccttccaatgacgcgccggttcatacagtttctgattcatatccattccccctatcagcattcaccttatactatgcaagttatgtgccaacatgggaaaatgcccctattctttacaaaaggagctttacccgtgatattcaatggatggtggtgcctatttttcggcatctgcatatttcttcagtttatactgcagcgtttgtcgagggatttttaaggctgcggcggtttttttaatattgccatgatgctgatttaaagcttcttgaatcaaagtttgttcaaatgaagaaacctgactttttaaggaggcgtcgggtgtttcttcctcgagcttctgcgtacgtaaatgagcaggaaggtatgaaggtgtgatgtcttccgcttcctttggcatcatcaatacggcatgctcaatggtatgttttaattctcgaacgtttcccggccagtggtgagccataaacaattgttccgtttcttcagaaaggcgtttgacgttttttgaaaactgctgatgataggtttgaatgaaatggcgggaaagcagcgggatgtcttgctttctctcacgaagcggcgggatatgaaaagatgacacatgcagtctataaaataagtcttctcttaaaatttgctttttcactgcttcaaatgggtccatattgagtgcagtaatgagtcttacatccacttgaatcgcttttgcatccccaatgcggcgcacaacaccatcctctaacacacgtaataatttcgtctgcagcgtgagcggcatcgcttgcagttcatcaagaaaaagcgtgcctccatcagccaattcaaagagccccttgcgatcaattgcgcccgtatagctccctttgacagatccgaataataggctctcaagtagcgattctggaagtgctgcacagttttgcggaatgaacacttggtttttccggtcagattcatgaacaatggcttgaacgagcacttctttccctgtccctgtttccccgtagacaacaactgatgacggataagcagctgctttttttgccttttcaagcatttcttttaagaacggatcatttgttaaaaatgaagcaaaatcatgcatttgttctgccccagccacatcgtgtatccgttttttctgatctaaacgatttgaaagggctgacagcttcgatacatcttttgcgacttcgaccgcgcctattaacttgctttcttcaataatgggcaatgtcgtgttgacggtttcaattctttctccgtttttattcaaataggtttgcagcgaatgataaatgggcttcccagttctcaaaacatgcataagcgtacttgttttttctgttaaagagggatacacctcaaggatgtacttgccaatcacctcttctttttgtaaacagtcaaacttagcggcattatgattgtaaaagatcgtcatgccttgatcatctacaacatgaatggcttcatcaatggcttctaaaattaattcaaaccaatccgctctttcgacaactttccccattctttccccctcactttcagtgccaaaaaaccggcgtctattgccggattttcagcggcttgatcatcttcatcacaccttctcctgtcctttcatgtttcgctttttccttgcaacttcctgctttttttgtctatagcgccaaaaaagcacccctcttatgaggagtgctttcgccctgatgtttgataaagagacatatcgaattcttgcagcgattccatatacagcggcactatcggctttccttcttgaaataacgtaaattgggaagggtataaattaattggctgatgataaaaagcaaatcgcttcacgacatcaggatcaatacggtaaaaggtatggtgcatcagtaaatagacatcttgtttccatttaaacagccgcctgtttggcggactaaatactggagaaacttgaatcatgccgccatcttcaaacatctgaagccgttcatttgaaatcgtatagatctccttagggtgaaactgaaaatattgcacgtcacgttttgcagcaaatcgcctttttttctgatcttcaatataatagaacgttttcccatgatctgccgtgacaactgtataatttggtactgccagcatgtctttcatctcatatttcatcgcacataacgatggcacccgaatcgcgcgcctgtttttttcgttcacccagcacctttcaatttcatgaagattgtcgcctgcgatttggtagtaatccccttccttttcaatcaccgttccgtcaatgagatcatacggcatactcgaaaacagatgatgaaaggaatgaggggttttatacgttgtatcaagtacatctcttaatggaaaaaacgcggcaaattgattcagcctcatccaaaaaacagaatctgcatgatgccagtgtttcggctcatcatcccaatattgcccgtatttttcatgaattagcgaaagcaaacgccttctgtgcatgaccgaacaatgatccacttgaaaggacgcatgctccaagatttggtctgcttcacggacaaagctcatggtctcaactaaatgcttatcaacatgcacgacccgctgcgaggaatacacaatatcgatatgaggattcgactgaaaaacatccaccattttctgcaaacgatcttgatgatacacagtatcatctgttaaataacaaatgagctgacctgttatacgggttagcgcttcattaataagcgtcgcataccgaacggttaacagccgttttgcaggatgaaccgtgcgtgaatacagatgaatgcgttcatcgtctaaatagggctggatcttttggagggtgccttgttctgagccatcatccataatcagaagctcccaatttgaatacgtttgttccaccatactctttagcacacgatcaatgaaatcaggtttattgtagcttgttaaaattaccgatactttcatgatcattatcctttttaattagattaaaaagccccccagctgacaatgttcacgtaaggaacattcactcttagctgatttgtcacgtttttaaagaccgctactgtatcaaagagctgcacaacaactacgttttgaaggacctctccattgactaaatgaacacgtggcagcggaatgccaagctcaagccatggacgaagtaattctttgatgtctgacacactctcttcctcactttcttctaaaagacgaagaagaagtaaaatcaagatgacttcaagtactccttctgcttctagtaactcttcgttccaaccatttaataattgttcaaattccattcataatccctctctcttcacatttaatctttactagagtatgagaatcacttcatttagcctcagcatttgaaaacatttttaaaaatgtgtgaagtaattaaatgaaaaaaagaacaaggaatcagcgttctgcttataccaaaaaaagtgaacggcatatacataggggtgagtttgaattgatgaagaaaggatggggaaaaaatgagcgacaagcgtgccgaattaaaaaaagaactattgaaagtgtttttcaaaccacttactcgtgcattaacagttaatcttgaagaaggaggagttcaaatggaagaaaaattgaacgatttattaagtgaagtggcagctgaggcatcaccttcagattctgctacaacactcgatgtatctcagccagcaagatggatttttgcaagacttgcaccaggaaccgtcatcagcattgtcactgactcaggagacttaatcgggccagttcaattcgtagcattcaatgctttaacgggtgttgtatttgttacacaagaaagctcagtcacaccaacaggctctgcaacgactttattagatgtagataaagttgaaagtgttacgttcacatcttaatgtgagagggtcatcatgaagcttctttatatcagctctggctacagcggaatctatcacatgtttgatcaatgggtagaagagagcttcattgattcccccttttcatgtgtgaaaattgatcgagaatctctacccgctcacatgcacaaaatccggacattttctccggattttgttttgatgatgatcggtgatcatgttccgagcgaagtgcttcatcaattcaaacaagaaaagatcccgatcgttttgtggatgacagaagatcccttttatacagatgtgtcagctgcttgcacgcgtgatgcgcggctcatattaacgattgatgaaggagctttgccattttacaaacaattgggcataggtcacacccactactttcccattccggcaaatacacgtgtttttcaaaaaaacgaatcgcctgaagagatgtgcaactatgacattgcactcgccggctacccttaccccaatcgcatcatcgccattgatacactcttacaacagaacaaatggcggattctcgttgcaggtaaggaatggcatcgtcatttaaataagtcacgaagacattatcgagatctcacactagtgaccaattggctgagccctcagcaaatggcggacatctatcagcaatcagcgattgttcttaacccgcacaggccggctcagtttgcctataataaaaacaaagccatgattcaaaatgtaagcctgaacaacagagcgtttgatatcgctgcagctggaagctttcaattgacggatctacaaccgccgcaagctttttcaagcttcgttttttataaagatgaggacgatttgctggaacaggttgaatattatggatcaaatcccgagaaaagaaaagcgatcgcacgaaacaattacgaacaagtcgtttcctggaatacatttgagacatttccacacaggctttatgagatcgtaaaaagcgccctatgaccgggcgcttttctcgttgaaattcatcttatgcataaccctccgcatctcggcgagccaataagactttctccgctttctcaaggtcttcctcctgtttcaccacgagtgatttttggcgatccatgatatacgctccaacagatccttctaaaaaggaatgaatgcattcttttgcatatggaacatgaaaagcatacactgctccatttaaacggccatacgtatatggctgctcatgctttggcatgaaaaagtaatgattgtccttatataaagtggcttcattattctcatgcagtgtccatgtttcatttgggttttctagcgcctctgtaaaagatgccatgcagtcataacccccttctactaaaagctgcaagcacttctcaatatcttccggctctcttaaaggagacgatggatgtaaatatagaacaatatcaaaggtcttcccctcacgctctaaataagcaagcgcatgcttcacagctatgagtgacggtgtttgttccgttacatgcgtgtctggcagttcaatcacatgggctccgtagtgagaagaaatgatttgagtattgacatcctctgtagagacgatgacttcatctaactcaatcatttgcagtaacggctgaatggtccaatagatgagcggccgctccgccaatacgcgaatgtgttcatcatgctgatcgcgcctgcttctaaaagctggtatcaaggctaaaatacgatttcccctatacatgtattcccttctcccctcgcgcaaagctctcttcattttcaccgagctgatcgcagtactgaagtgttcaggtctctcgtttttctacttgttctcttatctctccatattctattaagacgtcaagcagatggttataatttgttcacctaatttatatagaaagtggttcttttcctcaaacggataccggtctttcacatatgatgcaaagtagagaaatgagagttgggggattagatatgtccaaaaagatagaaacgagtttgaaggctttttttcgtgacaaaacgatattagtcacaggcggtacgggttcgatcggccgtcaaattgtgaaaaaattaacatcatgctctccaaagaagattatcgtcttcagcaaagatgacagcaaacaatacatgatgaaaaatgagtatgcagatcatccagaagttgcattcgctttaggagatgtacgagatgcaagccgcgtgagacagctcgtcaaaggcgttgatatcatctttcatgcagccgccttaaaacaagtacccacttgtgaagacaatccgtttgaagccgtacaaacaaatattatcggcggacagcacgtcattgaggctgcaatcgaacatgaagtcagtcatgttgtcaacatctcaactgacaaagcagtttctccgaccaatgccatgggtgcaacaaaattgatttcagaaaaactatttttccaagcaaacgaaagtattccgaatcaaaaaacgatgttttgctctgtgcgttttggcaatgtgcttggatcaagaggttcagtcattcccatcatgctccagcagctgttaaatgaaaaacctttgaccgtaactgaccctaatatgacacgtttttttatgtccatcgaagaagctgtctccctcacacttcaagcagccatcatgatgaaaggcggcgaaacattcattctcaagatggagtcattacagcttgctgatctcttaaaagcgttttatgaatatgccactcaaatcaatgtcgcatccccggatattctcgttgttgggaaaagacctggagaaaagcttcacgaagagctcacatttccgcacgaagcagatgcactatttgagcatgaacaattttatgccattttaccaagaccacaactgcacgctgactttcaaaaagtcgacttaaccaattacacatcaaatgaagcgcctctcattacaaaagaaaagctattccacatcattgaacaattacatcacacgcatcataaaaaataaaaaatcgtcacacggaagcagatgccttccatgtgacgatttttaaatagatcaatcaaatagatgtttcaaatccccatagccttctttttcaagatcatcttttgggataaacttcaaagcggctgagttaatacaataccgaagaccatttggtcctggtccatcaggaaagacatgacctagatgagaatcagctgttttgctgcgcacctctgtccgcaccatcccatggctcgtatccaccttctccgctacttcctcatcttcaagcggctttgtgaaactcggccagccgcaatgggcatcaaacttatctaaagatgaaaaaagcggcttgcctgaaatgatatccacataaatgccttcttctttgtgatcccagaattcattttgaaatggcggctcagtgccattattttgcgtgacttcgtactgcattcggtttaattctttcagacgtttttctttttcgtttgtcatgatttatcactccaatgggactcaataaaacccgctctgcccgaaccgacatgatatcgttcgtagtgcattttgttctttttataataatgctgatgatattcctctgcgggataaaaaggaccagcatctaaaatttctgtcacaattggcttttggaaagtgccgctttcgttcagcttctctttcgatgcttctgcaagctttctctgctcgtcatgatgaacataaatacctgtgcggtaggactctcctctatcaccaaattgccctccatcatctgttgggtctatttgctgccaatacagttctaatagcttttcatacgggaaaacgtctggatcaaacgtgatttgaaccgcttctctatgtcccgttgtatttgtacatacttcctcataggtcggattcactgtatgtccgccagtataccctgattcaactttgataatgcccggctgttcatcaaaaggtttaaccatacaccagaagcagcctcctgcaaatgtggctaattcttgtttttcagacatattagtgcccccttcatttaaaaaatggtatcatcatattataacatgatgaaaaataatgaaaatgatacgacttgtatacctaaaataaaagaaagcattctgtcgtatcttaaaatataatgggggtttaatgattggaacaaagaaaacaaatgatgtatgaaatggattctttactgagaaccgtatttaagcagatccgttatgagattaacagcctgctcgaaaacgaattatctcggaatgaatttctcattttaaatctgcttcgtgagcaaggtgcaaaaaaagtaacggaatttgcgtccattctaggggtgtcagcaagccatatcacagctgtgaccgacacactcgtagaaaagggctggattacccgtatccgttctaaagaggatcgccgcatcatcaaaatccacttaaccgataagggtaaggaaattactgagcattttgagaaaaagaaaacagaatactttatggagcgatttgagtcattcgacgacgaagaactgaaaacaatgatcaaattatttaaaaagctggataaaagtcaaaaggattaagcatagattttagcgctctggacatgctacggataaaaagaggtggaatgaaccatgacaagcccttatctttgtccaaactgtaaaacaaacagaacgcgctttaatctgattgagcagctttcagaacctgtgaagctggatcctgcgaccggagcagttgtcgaaagatacgaaggagagcagctttctccttttcacgtgagctatcaaggtcctcaaataaaagtccagtgcggcgtttgtggtttaattgaggatgaaaaaacgttcattaagctagctgaatatcatcaatattcttctccttcttaacttgcgggcctgacggaaaacgtcaggcttttttctatgcttcttttgcctatacagatcgcctttttcatgcatacgctacaaaaaacaccatcgcataagaaagtagggattgatgacatgcagcagctctcttatcatgactttccataccgtccactcgctgcgggcttcgagcaccctcaaagcagcccttcatccaaagcctttattcggctctttcacgctgcaccagatcttagtgagctcgctgtatatgtgaatcggaatgaggtcttgaaaaaaatgccttacagtcatttgacagcttatatggagtgggatgagggaatttatgagatagaagtgttcaagctggccacaaaagaaagagttcttcattcttgcatgatgattaaacgtagcgagatttacaccctatgtatcacaggtgctcatgcaggttttgcgctgctgacagagcggcaagatcctgtgattcaacacgaggacctgtcagcccttacatttgtccatctgtctccagaccttccttccattgatatatatgaacgtgatcaaggggtgttatcaaaggagcttcattatgtaaacagcactcacattcatcatttctccccgaataaatatcattttgaattaaaagccgccggtactcaaagtgtactgcttgatatcccaaaagttcatctgcaggcaaatcgcgcatacctcattctgcttcatggctttgctaacggagagccagagcttatggcgaaggtggtcttgtctcagcaaatataaaaaagagcctttcctcaatggaaaaggctctttacgagacatcttcagctttttcttgcttttgaaaatcaaaagcaagaatcatgatacctagaaataatgcacaataggcaatatttaagtaaaactgatcgatattttctgctcttaaatcagtggcagctgtaatgccaaagtacgcagcaaataaaagcgacagtaaactaaaatattgatagactcgcttcatgatttcactcctgactcactttctattgctttggatgataatatgagaactcaatttcatcgttctctagatcaattttgtttgctttcacatacatatcattcgtcagtggcatttctgaaaggcgtacttcaaccgttttttgatccggtttcacatgaacgaattctggcagttcatagaactggcccatgtagcttaaaacaaaactaatcggaatgctcaattgtccaattgaaaggccatccactttcaacagcacatcaccattatcttcgacagttggcgtaaatgagacgtttgcatcaatagtcgaagagaaagctttaattgcgcctgtcactttcacatcttgatcgatcgccacatgaaagtctggcatatcacttgatccttgatttttcaagtaatcattgataaagctggtgagcgattcctttgagctagatatattaaaagaatactcgctttttaattctttagttgaagcggattgaccgcctggcagcatcatcaaaataccgcaggcaagaacaatcaatagattgattgcaagtaaaataaaaaataagcttttccactttttcatacgttcaccctattccttcggcagtccttcttttttcactttggagaataaacgatttgccataagagagtaccccttttggtttgggtggaaatcatcatctgccagtaatttttcatcagaatcttcctcaaataaatctgctacattgatgatatcagcgttgccgtcttttttcagttcctttttggcagcggcattccaatctttgacgacttcatcaatatctcgcagctcagacaaactgaacttaaagggattgtacatgctgacatacatgatcttcgcatgatcattgtgctttctcaattgagtaagaatggttttaaagcgctcctcaaaaggaccctgctctttttgaaaaggagcaaacgtcaaattgagcacattttgatggacaacatgcattaagtcattgccgccgatcgtaaagaaaatatagtcagcgtctttcagtccgtcttgcacctttttttcttttaatctttttaataaatctaccgttctactgcctttaatggcataattttttaatgtgacagattgcacgccgtccaccgcttctaacttgtcacgggtcatgcctgcatatccttttttatgttgatctccgattccttctgttaaggaatctccaaccgctgcgatcgtaatatgttcttttacgtcttgtgtgtcttctagtttatcctttatgccagcctcttgcgcggaacatgcagaaagaacaaaagctagagacatcacaatcaaaatcaaacgagccttcaaacgatgatgtccctcctttttctgattaaaaaagtgtatcatgttttcgctcatttgaacatccttatgctagcttcgattcagcgttttgatgtccttgataatttcatcataaggtgtattttgtacaccatcataatttttcatcactttcccttcttgatcaactaggaaaaacaatgactgatgaatcacttggtcttcatcttcaggtttcttcacaatggttttaaagctcttcattgcgaatttttcgattgcagactgtgaatagccagtgagaaaatcccaatttttaaaggacaatggatatgcttttgcaaattcttttagcttgttcggtgagtctacctccgggtccacgctaaaggaaatgatatgcgcatccaacttttcttcttttaaccgtttttgcagctctgtcatatgagcagtcatcggcggacagatcgtttcacagcttgtgaaaataaaatctgcaacccatattttccccttcaaatcatccaatgacaccttttgaccatcctgattttcatactcaaacggctgtatttgataatttaacgtatctttgatttgtccatttgaacatgagactaaaagaagcacgcttatgatcataagcgtaccaagtgaggctcccctttttttaagcatggtacgtccatcccctttttcaatcaatcggtataaaaagtaaagcctattgcgccttttccagtgtgacacgaaataatcggtgttgtgtaggcgatgtcaacaagtgcttcaggtgtgtgatcaagcagcgctgatttgagcttttcagcgagttctaatgcatctgcatgcgctatcccaatggcttgaactgtttttcctttcacggcctgtacatactgtttggtcaaatagcggacaagcgcagaatagcttctcacattcgcttccggcgtgtataccccgtctgttaagctggcaattggtttgatgtgaagaagtgagccgatcagcgcctttcctcttccaattcttccacctttcacgagattttctaatgtatcgattgtgacaaatagctttgttttaaggcggattttatccatttctttgatgatgtcttcacggcttgcaccattttttgcaagctctgctgctttgctgacttgaaaccctaatccataggaaataaaatttgaatcaatcaccgtgatgtttccgtctaccattttcgaagcgctttcagcagtttgaacagttccactcatcccacccgttaaatggatactaatgacttcgcttccatctgccgtgagcttttcatataattcgacgaattgaccgatcgcaggttgagacgttttcggcaattcctcagcggcctccattttttcaataaattcatctggctgtatattcactcggtcaatataatcaaccccagaaatggagatattgagcggaatcacgtgaatggaaagatcattgattttttcttgcggaaggtccacagttgaatctgttacaattttaatttgtttcactatcgtctcatccttgctgtcttagtctttacttatgatattaccttatttcgtgcatacttgaaaacaactgtcatgacgtttttgaaattgtcacattttcttcttttcatgaaaaaaatccttgccaagctgagcagctgtcatttcaaaacggccgctcactccacttgacaaagatttctatttacgcattgtgtttcagtgtaggctcctgatagatctgctcatatgtgctccacttgacgttacgtttcacatcctctctgaaagagtacacagctctctttcctttagatacatagacttttttcaagaaagcttcaagtctaaaggtgagcatgaaaccatacgtctcatctccctttagtacagggacttctgttaccttgatctgagctccatccatccgtctaaaacatattgttttgagcagcacaaacgatcaatcctcttttccaatgttctgttacgcctaaataaataggtggaataaatcttgatctttattcacttcaacataatggaatccttttttattcatccgttcaatcagcgccgcatagtcatctctttctttcaattcgatgccaacaagcgcggggcctttgcttcggttattctttttcgtatattcaaagcgtgaaatatcatcatttggccctaatacttcatctaaaaattcccgaagcgctcctgctctttgcggaaaattgacaatgaaataatgttgaagcccttcatagatcatcgaccgttctttgatttcctgcattctgccaatgtcattatttcctccactgacaatacagacaacatttttccctttaatctcctcgcgatgggcatccagcgctgcgatcgacagtgcgcctgccggctctgctacaatcgcacattgattatacagctctaaaatggttgtacatacttttccttcaggtacaagactgattttatcgacaacggactgaagcgatgtaaacgtcttttcgccaatccgctgaaccgctgctccgtctacaaacttatcaattgaatcaagtgtcacaacctcgcccttttcatgggaagcatggagtgaagctgcgcccagcggttcgactgcaatgatttcagtttctggggcgatatttttgatatatgtaccaactccagataacagacctccacctccaacacttgcaaataaaaagtgaggctccacttcgatatcatttaatatttctacagcagtcgttccttgtcctgccatcacatccaaatcatcaaacggatggataaactcgcgcttctcttcatccccgcattttactgcttcatgatatgaatcatcaaacgtatctccggttaagataatttcaacatattcttttccgaaaagctcgacttgagatactttttgtcttggtgtcgtggcaggcataaagattttcccgtggatccctaaatatttacaagaatatgcaacaccctgcgcgtgatttcctgcacttgcacagacaatgccgttttctagtttatcttttggaagctggctcattttattaaaagcgcctcttaatttaaaggaacgaactacttgaagatcctctctttttaagtagacattacattcatatctttcagaaagtcgctcatttttttgaagaggtgtatgaatcactacatccttcaaattttgatgggcctttaaaatgtctttcacttgaattagcgtgttttctttgagcaacggtttcatgtacaagatcctttctctttaaccttatttaatttgtcattataacatgaatattcaaaaaataaaccaatagatcatggatcaagcataaatttcataaactttttcgtttttctgtacatttggttttattgggtgttacaattgaaccaattagaaccacaaagaaaggaatcacccgatgaccacacattcgtttacgtctatatatggagagcatcaatatatcaagcgtgccattcatctggcaaagcaattcacaaaacacgagcagccggtcttgataacaggagaaattggcacaggcaaaacactatttgcccaggaaattgcaaatgcagctgctataaacgcttcactgacacatctatattgccccatcttagatgaagataccttacagaaagccttcacggaaaagaccagtcaaattctttatttagacgaaatcgccgcattaaatattcctatgcagcatcaggtcattcgttttctagaaacctctcctgcaacaaaagtcattgccacttcgtctttatcaatagaggcattgagggtgtcatctacctttttacctgagctgttttatcgcttaaatgttttccatttgcccctcccgtcattagcagatcgaaaaacagacattcctgtgttaacaactgctttctttcaggagctgagcatgacgcctgatattgatccaagtgtttgggaaacgttgcaggagtatccgtttgaaggaaacgtacaggaactcaaaaatatcgttcattatgctgcagtcattctcgaggggcaaacggtatttttacaccacttaccgccttttgtgttaacacctctttcgccggacgtaaaaggaaaaaaggaagaacaccagctcacactaatggaaaaacaagagtttgttttcctgctggaagccattaaatctctcaatgagaaaggagaagcagccagcagacgcatcttgtctgaattaagcaaacaaggcgacattccgctgacccctcagcaggtgaggagccgattagatgatcttgagaaaaaagcttacgtgacgaaaggaaaaggcagggccggcacgaagattacacttgaaggtctttcattcctgaagtcacttgatggttatataccggttcaataaaaggaggctatccattgtttactgtaaaagaagaaattgcaaacgccattacacatggcattggcgttattttatccataccagccattgtttttctcgttttattcgctgttcaatacggcactgtcacagacatcatcagcttttcgatatttggcttatccatgctgctgctctatttaagctcgaccttgcttcatagcattcggcacaaaaaaacaaaagatgtatttgaaatcctcgaccactcggctatttatgtattgattgctggtacatatacgccctttttactaggaccattaaaaggcgcactaggctatacgcttcttgcgattgtatgggcgcttgctgctggcggaattgtctttaaaatctttttcgtcaaacggtttatcattgtgtccacgctcgtttatttattaatgggctggatgattatcattgccatcaaaccactttacattgggttaacgggcgcaggatttggcctcttactgttaggcggtctattgtattcagtcggaaccatcttttatatttggcggaaaattccctatcatcatgccatttggcacagctttgtactcggcggcagtgcatcgatgttcttctgcattctcttctattgtgtgaacattcctgctgcatgaaaaaaaccagcatccactttcggatgctggtttttctatgcgcgcttttgggcgtaatcactcatcatgacaggtgctttaatatgaatatcaacattaacagggcgaagccttttgacgatcttcccagttaatagacgatccgttccacttgtttcaatcggtacaagcggacaatcacaatcttcagcaagtgcctctgccatgtgacgctttgcttctggaagcaatacactctgcccagataagattctttcctttgcttcttctaataaggcatcatcagattgattctgatgaataaccgccatcttcttcagccattgttttaaaatgggatatcgaaaaagattcggctttgccatgaaagcaaatggcttctcaaggtgaccaatcaataatgtcgtcgtgactggattcagtgcctgtgtgatataaataacgggtccatctggcagcttcttttgctggtgaatggtcatgactgatcctgactgatcaatacagccccgggcaaacctttttgcatgctcatgaatgagatgcattcgtttcgtataggaaatgcgcggatcagttaattcatgagcatgcaaatgcctcatacttttaaaaatggatagggcaacataaatcgttaaaaaccaataacgaaacaaccgtactcctcctactcatttatccttttttgtcatatacgacaaattcataattgtaggggttcttttcgtcacgatggcctttttcgcgtgatacaaccgtccattcgttttcattgtaatcaggaaagtagcggtctccttcaaacgcatggtgaatatgcgtgatatatagacgatccgcatatggcatcatttcttcatacagcttagacccgccgatgataaataattctgtctcgttctccccgattgccaaaatatcagcaatggaatggacaacctcgcatccttctgcttcaaaagaagaacttgtcgtcaaaacgatatttcggcggttaggcagcgctcttccaattgattcaaacgtttttctgcccatgacaatcgtatgcccgcctgtgactttcttaaaatacgctaaatcagctggtaaatgccaaggcatttgattatcttgaccaatgactctgtcttttcctgtcgccacaatcatcgaaatcatacactgacttctcctttgatatgcggatgcgggtcatagttctcaagcacaaaatcatcgaacgtgaaatcaaaaatgctcttcacatctcttgtaatgcgaagctgcggaagcgtgcgttcctcgcgctctagctgcattttcacctgcggaagatgattctgataaatatgagcatctcctagcgtatgaacaaactctcctggctcaagatgtgtaactttggcaatcatcatcgtgagaagggcatatgaagcaatattaaatggcacgcctaaaaagatatctgccgatctttgataaagctggcaggaaagcttcccgtttgatacgtaaaattgaaacagacaatgacatggaggcagcgccatttgatcaatttcacccgggttccaagcgctgacgatcagtcttcttgaattcggattatgctcgatatcgtggatcagctttgtgatctgatccacagtctcaccgtccccactagcccaagatcgccactgcgctccgtacacacggcccagttcgccattttcatctgcccattcgttccaaatccggacgccattttcctgaagatatttgacatttgtatcaccttttaaaaaccacagtaactcatgaataattgatttcaggtgcaatttctttgttgttaaaagcggaaatccttcctgcaaatcaaatctcatctggtaaccgaacgtgctgattgtacctgttcccgttctgtcacctttttcatccccgtgctgtaatacatgacggcataactctttgtattgtttcatttttttcatcctttatttatgttcttgttgtagtttaccttatttctgcttttgtttaaaccaaaaaaacatgcctgcatgatgagcagacatgtttttctttttatacttgattcactcgatcctgctcttcgtccttaatatcttggtgtgagtgagcaatacggctagctgctgctgcggcaagcgcggcgacaaggtcatcaaggaaggtatgcacttcacctggacgaccttcatctaattctcgaataataccaaatttctctttatctaaataaccgaagttggtcaaaccgattgatccatatacattgacaatggaaagcggaataatttcatcaataccatatagcggctcgtctgtttcaactaagtgctgcaatggttctggcaatagctttttttcagccagctgatcaagggcaagtcctgttaaaaccgcatggacaatttcccttttattcaacactttttcaacattttcaatacagacactaagtggaaggtttggatgatatttttcttgaagctttagcacaatatgtgcaatatcttcaattttcactccacgttcgtttaacatttgttttgtaatctgcaccatttcgttcattgtatactttttcaattggcatgacatctccttctagtggctcatccagctcggtggggtgtttttgtcccagtaaatattaccgagttcatgatgcgtctggaatccatcttctgctgtatggtagtgaaagttaaaccaatatccgctgtgtggcggctgatctcttctcacatgaaaacggagcaaatcttctccagtctttcggttgtagatgtggaagattttttcgccatttccgcttgaaggctgatcagttaacacaacatcttgaaatttttcgtcatctttgaaatttgttaaaacatcggttaacacttgttcaattttcggttgaatctcttctctgtactcgtcttcaatgacaggtgtgattttacggccgaatttgagaaaggattgattttctgcacttgatagaacctcctccttatattgctcaaaggggtctacctgctctttgttgtcctcttgcgatagttcccagctgcgcaattcatctgatgtatcataaaccgctgtataaggcgttttatcagatgaagaaagttcagatggcttgtctgtcatcaaagccgacggaggagagattaaaccaaaagttgcaattgtaaagagcgcaacaagcgtttttctcatccacatcttcatgatatctaattccttccataagttatcatactgctattctagcatataatgaattttcagtcattcaatttggccactgatttgagactttctttttcataataaaacgtttacaatgacagtaatgacgactaaaatttgggaggaatgggtatgcttgaagggtttttcatcacagcttccttgctgacactgttttattttgtctatatggagattacggattaaaagcccttagaaagggctttttcagattgttgacaaagggctaaaataatcttgattttagtcctttgtcttctattcagcgtgatagaaaacctttgaagtctaggaaggacgagcactggaatggagcgaatttgatattcgtgagtaccggagcgcgggactgacaacgaatgcaagggtttgtctacacgctgtaaaagcccttagtgagggcttttttctttctcaatataaccataatgaaattgggctgtttttcgttttatgacgtgaaattgataggattccgctgtaaatcgtgtacttttccaatgatcttttaaaaccactctttttcttgccactcttaacgcctcttgcacggctatttcgtgatcaaagtggtgctctgccgcatgacgcagcggcgctatacttgtagattcttgaatcgtttcctcaaacatcggatcaaaatagacaatatcaaatgaacggtcaggacactgctttagctgctcgatactgtctccactgatcacagatatccgtttcatcgcttcatctgcttcttctatccctgtctcccatgtgttcagtccttctcgcactagtaacgccgtaatgggattcttttctataccgatggcccttccattcctgcctatcgcacagcttgcagtaatagcatctgaccctaagccaagtgtgcaatctaaaaaggaatctcccggctttagctgtgctgcttcgattaaaggatccttttctccgcgcaagagccgcttcaccctgaacatcgctgagcttggatgaaaaaagaacttttcaccattaggctgataccattcgaatctttctttcccgacaacaagtacatctcctcgtttcatcgcaagctgcttgacggattgtttgcgtctttctacatactcaccatgtaaatcctctgcaagagccttcgctgtttcaatcgtttgttcatttgctctaaagcttgttgtaatgagcatattgttcctccatcatgatcaagaaaaaatgccctgatctgatcacagggcatttcaacacttgtattagcaatgtttttcgaatgcagttaagacatttttcatgatatcttccatttcatgaccttcaatttcgtcacgcgggataaaatgaacgagttcatttccttttaaaagggccatagaaggagatgatggctcttcacccgtgaagtattctctcatttttgccgttgcttcccgatcctgcccagcaaatactgtgacgattctgtctggagctttttccgccttcatcacagcttgagtcgctgctggacgtgctaatccggcagcacatccgcatacagaattaatgacaacaaatgttgttccttcagcttcttgcatggtttgttctacttcttcttccgtcttaagttcttgaaatcctgcacttgtcagctcttggcgcattggcacaacgagctggcgcatatattcttcatatgccattgacataaaaaagccccctctaaaaatccttatgttgtgaataaaggatactatagagagagccaattttcaaatgttccatatcagattaaattttcatgattccgcctgtattggctgatgtcacaagttttgaatatctagcaagatagccagttttcacttttggctcaaagcctttccagtttgcttttcttttttcccattcttcctctggaacatcgacgcttaaaatgcgttgttcaatatcaaccacgacatggtcaccattttcaacaaaggcgagcgggccgccttcagctgcctctggagagacgtgtccaatggacaaaccacgagaagcgccggaaaaacgtccgtcagtaattaaagcaacctttggcccaagtcccataccgacaatttgtgaagttggtgcaagcatttctggcataccaggtccgcctttaggtccttcatagcgaataatgacaacatgtcctgcttctacttttctattaatgatgccttcaagagcttcttcttgggattcaaatacgatcgcaggtccttcgtgacgtgtgatcccatcttgtaccccgcccgttttaatgatggctccatctggcgcaaggtttccaaataaaacggctaagccgcccttttcagtaaatggcttatcgattggataaatgacgttatagtcttttacctcatgtcctgcaatgttctcaccaagcgttttcgctgtgacggtcattgtatctaaatgaagtgcgccttcttttttggacaattcatttagcgcagctgtgacgccgcctgcttcatgtaaatcctcaatataaacatccgaagctggagcaagttttgataaatgaggcacacgctcagctacttcattgatacgttcaagtgaatattcaacacctgcttcatttgcgatcgccagtgtgtgaagaacggtattggttgaaccaccaagtgccatatctaatgcaaatgcgttatcgattgctttttcagtcacaatatcacgtggtttaatatcctttttaatgagctccatcagttgttttgctgactttttcgcaaattctcttcgctctggtgatgtcgccaaaatcgttccatttccaggaagagcaattccaagcgcctctgctaaacagttcattgagtttgctgtaaacatacctgaacaagaaccgcaggttggacagccaaactgttctaattcatttaattcctcttcgttaattttacctgactgatatgcaccaacgccttcaaatacagaagaaagagaaatctttctgccatcacttgttctacccgcttccatcggtccaccgctgacaaagacagtcggaatattgacacgcatcgctgccatcatcatccctggtgtaattttatcgcagttaggaatacaaaccattccatcaaaccagtgagcagatacaacggtttctacagagtcagcaatgatttcacggcttggtaatgaatatctcatcccgatatgacccatcgcaattccatcatcgaccccaatcgtattgaattcaaatgggaccccgccagcttcacgaatggcttctttcacaattttcccgaattcctgaagatggacatgtcctgggacaatatcaatataggaattacatacggcaataaatggcttgccgaagtcctcatcctttacccccgccgctcttagtaagcttcggtgaggtgctctgtcaattccttgtttaatcatattactgcgtagttctgccatctgtttaaaaagcctcctatactacaagtcttgttgactgcatgattttgagttgattttattttacaaattttctgtttatttagccaccgatgaatgactgatgaccaacatgtctgctgaaactagcgctcagcaaggttcgtgtcataaaatctgacctccaatattctatattggtactactatatagagttttttcgcatatttcaacaatattcaaaataatttttctaaaaaaatttttctgtctatcactttaagaaaaacaagctgcctttcattggcagcttgctcatatttctcatcattctgatgcattttttctactttctgtcatttgcttccatacagagcctttcgcttcttctccgtgctcaatgcgctcaatcgccattttcacttgaaggctgacttcaaattcagggtcttgctcagcttcttttaatgcgtcaagtgctgtttcgtcaccttcttcatagaggaacatagctgcacgccagcggacaagtttactcggatcctttaatgcttcgatcattgcttccatagcgctaggatcaccaaggtctgaaatacagtctccagcggttctgcggaccgtcacagttttgtctttaagtcccttatataatataggcagtatagcaggatcttcaatcattccagcattcacaacggcttgtctgcgaatggatgtttttgggtcctccatcgctttcattaaaacaggtatatccttttgctctggctgcatttgctctaaatgggcaaaacgctttttccaatcttcctcgcgcagcatgtcttctgttacatcatatgcttttcggttcacctgtctatctacggcttcttgcccttctttgaccgcctctgttaagcgggctaaacgctcgtcatcataggctgcttgcagctcttctgtgacttcctggccgatatcagcaaagtcaccaaaacgaacgccatgttctttccacacacgttcaaatacgacattgtctgaactgcttctgagctttaaaatggctgcttggaagcgttcaggcattccgaaccgctcttctctttcgccgtcagttaatttgacttgcatcggaatcccattaaacatttggacaaacactttgacttcgccaaatgtgtcaacgcctgactgcggtccttcctgaaggccttctgtttcttgaccaaaggcttctctcacctgttgtaaaatgccctgccagtcaaactttgcattacgctcgaccgctaagaaatctgcgacatgataaacaccttttacaccttcaatgttcaaaatgcgcttgatcatttctggcgcttcgtctttttgatcctttttgtagttgttgcttttaccgccggcaagtgcttctgtcaaaatgaccttcatggtatttggacttggcgtcggttctatcgctgttattttcatctatacatcctccttacacacataaagaccctactcatctgtaaggccgcattcttctttccacgtcttgataaataagctcatcaattcatgccgctcctcagcaagctgctttcctgcagaggtgttcatcaagtcttttaatttgagcaatttttcttccatatgctttagcacggagccctgctgcgtgttatttgtatagtggggctcccctcttgcgcctgcataagtaaacactcttgcaataccgcttgctcctatcgcatcgagtctatctgcgtcttgaacaatggccccttctaacgtcataggcctattctgcttatgtcgatgacgaaaagacatcgtggtaatgatatccatgatataacgaatatcccgcgtattaacttcccaagaaaggagctgaagctcaagttgttgcggtgaaagcttccattcactcgacagcttttcatcaatgacatcatgaacaatcgctgccatttcgatcataaaaagagagccgccttcctgattagcaatctggcgggcaagctggcgcacacgatcaatatgagccgcatcgtgtccagtcggttcatatttcagctgatctgaaacaaaggaggcagctgcctccaattgttttttctgcatgactgtgagcaccttatttgtccaaaagagcgatgatggagctttctaattcttttggtgatgttttcggagagaaccgctcagtgacttctccgttttgatccacgataaattttgtgaaattccatttcactgttttcgttccaagtacaccttttgcatgacttgttaaatgtttgaaaagcggatgcgcattgtcaccattgacatctactttcgcaaacatagggaaggttacgccataattcaaagaacagaattcctgaatcgcttcttccccttctggctcctggttcataaattggttgcacggaaatcctaaaatttcaaggcccttttcatgatattgatcatatagctcttgcaattgtttgaattgaggagtcagtccacatttgcttgctgtgttgacaataatgagtacttttcctttgtaatctgccattgatttttcctgaccgttaatggtcttgacctgaatatcataaattgacatctcatagcctcctaggattcactttttcctatcgtaacatgcttcttttataaaatcgctttttatgcctcctgttaaaagagccctgtcacactgccgtcttctaataaatccatctcgagcgccgcaggttttttaggtaatccaggcattgtcagaatgcttccggttaaagcaacaataaatcctgctcctacagatggttttaactcacgaatcgtaatggtaaagcccttaggtctcccaattaaagctggatcatccgaaagtgaatattgcgtttttgccatacaaaccggtaaatgaccccagtcgtttttctcgatggctgccagctgctttcttgcttttgaagtgagtgtgaccccgtctgctccataaaccacttgggcaactttagataacttttcttcgatagaatcattttcttcatacaaataggaaaagtggttcttcttcttttcaataagtgtcgcgagttcctcggcaagtgctgtcccgccttcgcctccttcttcccatacattcacagctttgactggatggccatgtgcgtggcaccaatcttctatcgattgaatctcttcttttgtatcagtgataaacctgtttactgcgacgatgtatggaagaccgaaggcttgcacagtttcaatatgcttttctaaattatgtataccttctaatacggcatgtgcattctcttctttgagttcagttttcttcattccgccatgcatctttaatgctctgacagtcgccacaatgacaactgcaccaggcttgaaatcaccagctcttgttttaatgtgcaggaacttttctgctccaagatctgctccgaatccagcttctgttaccacataatcggctaatttcgcagccattttggttgcaatcaaactattacatccatgcgcaatattggcaaaaggaccaccatgtactagggccggagttccttcaatcgtttgaacaagattcggtttgagcgcgtcttttaaaagtaacgtaagaacaccttcatatccaagtgctccaactgtgactggctcgccatcttgattataggcaacaacaatagaagaaagacgtttttttaaatcggttaagtcttctgctaaacaaaggatggccatcatttcggaggcaactgtgatgtcaaatccgtcttctctaggatacccatttaactgaccgccaagtccgacaacgacctgtcttaatgcacgatcgtttaaatcaagcactcgcttccatacaatgcggcgcgagtcgatgccgagttcatttccgtgatggatatggttatcaatgaacgcagataaggcattatgcgcagaagtaatggcatgaaaatctcctgtaaaatgaagattgatttcttccattggcagcacttgtgaatatcctccacccgctgcaccgccttttatgcccattgtaggacctaatgaaggctcgcgcatcgcaatgattgcttttttcccaattttttcgaaggcttgaccgaggccgactgttacggtagacttcccctcacctgctggcgttggattgatcgatgtgacaagaatcacatgtccttctttttgttcttttaaacggtcaaaaatagtcaaagatattttcgcttttgtgaaaccatagcattctaattcttcgtcatgtatttgcagctttgctgcgatgtcttgaataggtctcagctttgccttttgggcgatgtcaatatctgataaatgctttgtgatcataaataaacggcctcctttttttccagaaacagctttgtttttgctctgtttttcattgtaacataattgaaacattgaaatatcgccagaaagttcctataatgaagtgaaattagctttggttcagggggtggcgagttgcctattaacataccagttcatctgccggcaaaacaaatactagagagcgaaaacattttcgtcatggatgagacaagggcattcaagcaagatatccgtcctttgaatatcgtgatcttaaatttaatgccaaaaaaaatacaaactgaaacgcagctgctaagaatgctcggaaattctcctttgcaagtgtactttacgtttttgattccaagtacgcatacaccgaagaatacgtcgagagagcatctagatgaattttatacgacctttgaatcgattcgccataagaaatttgatggaatgatcatcaccggcgcaccaattgagcatttagcttttgaagaagtgtcctattggaaagagcttcaggacatcttggactggagtaaaaccaatgtgacgtctacccttcatatttgctggggtgcacaggcaggcctatatcaccattatgggattgaaaaaatcaagcttcccgagaaaaagtttggcgtatttgagcatcttgtgaaagagaaaaaagaaagattagtcagaggtttcgatgaagtatactatgtcccacattcgaggcatacagatattaatacagaacaattaaaaaacacgccgaatttgaaagtattgagtatctctgaagaagcgggtgtttgtttaattgtttcagatgatgataaacaagtatttttaactggacatcctgaatatgatacggacacattgaagcaggaatatgaaagagatttgttgaagcatgatacagtccaaaaacctgtccactattttatagaagatggtgacacattagtcccagtgaatcgctggaaagcccatgccactttactgtttatgaattggctcaattattatgtttatcaagaaacaccatacgtttgggaataaaatagactgtggtctgatgataaatgatcaaaatgtgttaaaatacaaatggctctgtcttccattatcaatttagtctcgttgttttttaaaattagtttaattctttcgtaacgaatgatatgctctggctgtttatatgttatctttatgtatatgtagacctatgagattaatagttttcgtacgaagttttgttgttgttgattacatttgaggtgaatattcttgaataccaataaaaaaatattaatcttgaccgcaaattatggaaatggacatatgcaggtggctaaaacactgtatgatgaatgcaaatcccaagggtttgaacatgttgtagtttctaatttgtatcaagaatcaaatcccattgtgtcagaagtgactcaatatttatacttgaagagcttttccattgggaaacaattttatcgcttgttttattacggtgtagataaaatttacaataaacgcaaatttaacatttatttaaaaatgggaaataagcgtcttgatgaactcattcaattacacaatccggatatcattattattacattcccgatgattgttgttccagaataccggaacaaaacaggcaaagtcatcccgacatttaatgtcatgacagatttctgtcttcataagatttgggtacatgaaaacatcgaccgatactatgttgcaaccgattatgtgaaacaaaaattagtggaaatcggcacacatccaagcgatgtcaaagtgacaggcattcctattagaccacaatttgaagcagacgtgccaaaatcaaagatttataaaaaatatggattatcatcaaacaaaaaagttcttctgattatggctggtgctcatggtgtactgaaaaatgtcaaggaattatgtgaagcgctgcttctcgacagtgaagtacaaattgttgttgtatgcggaaagaacgcagcgctgaaacaatcactgagcgatcttgaacaagcacatccagatcaattgaaggcgcttggatatgtggaacaaattgatgaattgttcagagtaacagattgtatgatcacaaaaccaggcggtattactttaacagaagcaacagcaatcggtgtcccggtcattctttacaagcctgtccctggacaagaaaaggaaaatgctcatttctttgaagattatggtgcggccatcgtcatcaacagacatgaagacattttagaatctgtgaccaacttgctgcaagatgaagaaaagttagaagtcatgaaacaaaacattaaaaaactgcacttaaagcattcttctcaaaccattttggaagatatcgttgagcaatcagatctcatcacgaataacaaaacgtatgctcgtgcattatcataaaaaggtgtccgtcattgacggacacctttttctttatccttgatttccatttgttgtgtacacttcttcaaacggctgcacgacaacaaaaccgcttccgctaaatttcatttgaatagactctccgcttcctctgccaataaaggttttgaatgaaacatctgtcacaaattcagtttttaaatcccctgaccatgcaactgtcgcgttcggatctgtatagacagagtcacccggctgaacaatcaatgtgagcggctcataatgactcgtaatcgcaacaaggcctggtccttctaatttgacattaaataaaccgcctgcaagcatgcccgacacttttttcatcaatttgatatcccagcgcactgacggttcaaatgcgagcagatcattcccattcacaaaaatggaatccccttgagccaaacgaagaattgagatttttttgccttgatctgccacatataatttcccatcacctgttgccttcatgagtgaagtgccttctcctgacagcatttttttgaacatctttgagacgccatgttcaaaaacgccctcgcgttcaaacttgattttgcctcggtacgaaaccatggaacctgtttttgcccaaatggtatcagtcaaattaatttctaaaagtcttgatgtttcaagttcgaagaccccttctcctttatcttcctgctgcgtattctgaacaaattcttcaagtgtataacgattcatgatagcacctcttcctgtattttttttatatacggacaaggtgtgcataaagtttcagaaaatggggacggtttatcttttattattattcgccaaaaaaaatcaaacattctgctcaaaatttggctctcacgcttgacgctttacttttgatggtgtatagtggaaccatcatttaacaactgcaaagtcgttaggtgatgaaaattttttttagtatgccaaaaggtatgctacagtactaggaggaaaaagcaatatgcaaaacggtaaagtaaaatggttcaataatgaaaaaggtttcggcttcattgaagttgaaggcggagacgatgtattcgttcacttcacagctatcgaaggtgacggctacaagtctttagaagaaggacaagaagtttcttttgaaatcgttgaaggtaatcgtggacctcaagctgcaaacgtaacaaaaatctaatcaactaaatcaatgatgtaaagacaaaataaagagaggcctatgcctctcttatttgattttcagctgaatttcaatcgctaaaatattttgcttcagtcgttgttcaatttcagagatatctttttcgagaaaaggtcttcccttctttgctacatctactagttgctctagatcgctgtacacctcttgaaatgttcgatgtaataccgtttcgaactccttattattcataccggccttccccttttcctctaatatccgtcacttagtcaaaaagtaactcaaccaaaactttctatagttatatcggctcatttttcagaatatgttctttttttacacattctatccgttttttttcatgaacggatgtttgagcagggaaaaccggtgcgtccgcttactttttgagcagcgtctgtccatattcttttattttctctccaacggtgcattgctgtatacaaaaggaatgggcatattttttgccaaattctttccgaaaatgcttcttaatcaaacaatctgaacaatacgtgtcttgaagatcggtcaattcttgtactgctgtttttttatccacattattcagctccgtctgcttctaatttcaatgtactttcgattgggacgtctgcaagaatctgtcttgcaagctgatccgcttctgcattttgtttccgatcgatgacttcataggttggcgtcagcttcagctcttttaaagccgcttcaattcggtcaagccatttgttatgtacatcatcataacaaggccattctccttttaactgattcatgacaacaagtgaatctcctctaatcgtgacagaatttctgcttgcccctaggtcttttaaagcttttactgcctcaaataaagccgcatactctgcttcattattggtgctcccttggaaaggctgattttttctcaatcgataagcgtcttttcccagcttatagtagacgacaactccaagaccagagtcgcctgtttctttatgaaaacttgcatcaaaatagacttgaagctgatcaggttcaagctttagttcttcatttagcttttcaagctcttttatggaccacatggcccctttttcatcttcaaatgacaggagtgactgtggttcttttttgtcgatatgttttgctaaaatcaaggcctcatttagctccatccaatcttcttggaaaaaagcaatggacccaattgatttcactttcattgtgtagtgtgctcttaatttcattgatcacatcgccttcccgtgcttttaaggtaaacatacgttatgctataatcaaaaagttacattttacaatgagaaaggaagttcatgtcacttgtttaatgaaggtatttggatcttatttgcgatcattaattttatcattgttcttctattttataaaggatttggcaagatgggcctttttgtctggattggctttgcgacggctgccgcaaatttacaagttgtcaaaaccgttgaattatttggcttaacggcaacacttggaaatattttgtacggcagtgtgttctttgcaacggacgtattaaatgaaaaatatggacaaaatgaagcgagaaaagctgtctggattggctttgccacccttttaacactaactgttgtcatgcaggaggctttgcttttccatcccgctccatctgatatctcacaatcatcgctggaaacgatatttggctttatgccaagggttgcacttggcagtctcgctgcttatatgatcagtcaaatgctagatgtttatgtatattcgtttattcgccggatatttccttccgatggtgcgctctgggtgcgcaacgccggaagtacgatgattagccagcttcttgatacactgattttcacgaccattgcctttcttggcacgtatccatttcatgtatggattgaaatcttcatcacgacatatgtcattaaatttatcgtagctgcgattgcgacaccttacgcgtatgcagcgaaaaaaatggttccgcttgatgaaagggtgaaataatgtgccagctgaaatatacattgatggtgcaagtgcaggtaatccaggtccctctggcatcggcattttcattaaatatgatggaaaggctgaatccttctccattcctcttaaatcaatgagcaatcacgaagcagaattttccgctctgatcgaggggatgaaaatatgcgcggaaaaaggattgcgtacagtttcatttcgaacagattcacaagtagttgaccgcgcagccaatgcaggatttgctaaaaatccagcctttcagcattttatcaaagagatgatcgaacttcaaagccagtttgatttatttttcattaaatggattccgagtaaggaaaatcaaatagcggatcagctcgctagaaaagcgattcacctttctaaaggatgaatcgctttttttcggttatgctaatgtgtgtgaggtgatactgattggataaagaaaataaaggtcgtgtcacaaatgggacaaccccacaaggtgatgcgcaaacaaaagataaacagccactatctcagctggaaaatagagcgaagaaaagcaatacaaaaagatgaacctgagagatcggctttagctgatctctattttacttaaacgattcatcatcggttcgattcctttgatttgatggtacctcagcatagcagcagcacgttcttgattgatgttcattttcgtctcatcaattggacagctgagcgggacatcacatttgatctctgccaatagacgagaaagcttcagatcttctaatcctgcttgcattttcttttgctgtgcagccgttagttcatggacattttctagcaaaccgtcaatcgtttcatatgtttggataaattttaatgcggttttttctccgattcctttgacacctggataattatcacttgcatcacccatgagtgctttcatatcgatcagcgcctttggagagattcccatttcctcttcgaataaggcttttgtataatgcttataattgccaattcctttttgcatcaaggcaacagtgacttgttcattcaaaatttgcagcaaatctttgtctccagttaggacagtcacccgtgcttctttttggtagagcgcagcaagagtaccgatacaatcatctgcttcaaagccctttaaaccaatgtttacaattcccagttcttctgtagcttcttttgctaaatcgaattgcggaatgagctcgacaggcgcctctcctcgatttgctttataatcttgaaacaattcgtttcggtatgtttggcttcccatatcccagcagcaaacaatatgagttggctcaaatgtctgtacagccgttaataagtgctttaaatagccattgactccatttgtcggcacaccgtgatcatttatcataaaattgcgatgtacagccgttgcataaaacgatctgaacaaaagcgccattccatctacaagcagtacgtgtttattcattcttataaactccctttttcaaaacaatactcctattctatcacagaacacaaaactcgacataaaaaaggcgccttcttcttttagaaaagaagaggcaccctgtttacttttgaccgtattgcatttttttcgactctgcttctgcataggacggcatgtctttttgtttagggtcacgctcatcctgctgctttgtctgttgcttttttttcatgatcattcccctttctcggtacattcattaagatgaccaaaaaagagaaagttactctttacttctgtttccgcttgacatactccctgaccatatcattcgtcacatgcttacgcagcggaacaataccgcctcgtgcaagctcattcatcttcgacgtaatggcattgatgtcgtctgttgtaaatggctcgttttgctcacatttgaatacagcagtctctattgcttgttctcttttctgttcaagctcaagaaaggactgaatatgagcatgctgcttttgtgagtgagcggaaatctcttcgtgtacgctcgtcattttctatcaactgctttcttttttatttagtctaccatgaatcaaatggttttcaactggttcttccattcgtttgtttgttcatatacttgttcaattaccgcctgttctttggcatctgtcgttaggctcgtgataaatgtttgtttttgttcacttagctgctcgagcgcttctgtttcatatctttcagtaaaggtcttcaccattgtgtcgtacctgctcagtaattcttctttttctttatctgcccatttcgtggttaactgatgaagaatatctcgaatcgcttcaatgaacgcagcctttccattctgttcaaagaaaactttcgctgatttttgcttctttaagagcggttcgaatggtgtcagttcagattcgacttcaatttgtttcagctccgcatttttctcttctggcggcgacagtgagagagaaaagtaagggtcttctgcacatgccgcctgcaatcctttttcccattcctcttggaagtattgatgaataaacgattccattcggatatcaagcgcctttaactcctgtacaaattcaaattcataatccttcagtgcctgttcaagcgcttttttcaactgctgcctgaagtctccttgagatattccagggtaaaaggctgtctttaacagatcattcgcaaatagtgataggcgctggacaatatgatagagctgttcatgtaagtcctttttcacactttctgtcactagcttagattgtttgatatgactcatttgatcaagaatcgcttcataggatgtgtctatctttttcttttccgcttgcttctcatcttctgactgatgcagtgtcgcatgcagcttgtcgactgtgctacataacctgccggcttcaaaatacaaaagctcgatcgcatctttcgttaattcttcctcaataaaatagtcgagctgttttctaagctttgcatattgattataagctgtctctccctttccttcgatttcttccttactggacacatgatgaaggtttgggtttcggatgccttcttttgtgagctcattattcacatagtcaaagacggtgtcaagctctgcttgatcctttgcgaggtcagctgcattgataataaagaacattttatccatgctaaatgaatcttttacaagcccaagcttacgtaaaaatgaccgatctgccttcgagaaagagtgctggtagtaagttaaataaagaagagcatctgcgtccttcatatattgaaaggcaatctctgtatggcgcttattcatactgctggcgcctggcgtatcaacaatagtcagccctttatctgttaaaggtgtactcaaatacaccgtcacttccttcaccacacaagaaacagcttcttccgccacatatggcctcagttcttgaagagtgacatgaagcggcgtttgcttcgtaatgtgatgaaggaaacgtgtatgcgcttgtaaaaaatgttcaacaatgatgcggtgatcttgttcaagctgtctttttttcagcgttcgttcgagcttggatgtaaacgtctctcccttttcttctgagatcgaaaatccgaggatctgattgagctcctctaatatatcctgttctgttttgaacaccacttttacactttcatgcgggtgatcttccgtcggccgcgtcagcttattaatcgttgccgttgttggcgtgggagaggatggcagtacctttctcccaacaagggcatttgcaaaggaagatttccccgaactaaaagccccaaataaagcgagtgtgaattctttcgcttgcagccgctttgttcgtttttcaaaggactttctttgagatttgagagcgtctaatggcaataaaatctgagaaagctgttcaaactggtcaattgactgtgccgtcgtgacatgctgtgactgacgcatttgatgttgctctgtctgcttctgcggtttttcttgctcgctctcttcgggatgaatgggcgcgtgatcctgctttagctggtcatgctgcatccgcctctttttcgcataaaaccaatcttcttcgatctgttcatccgttccgttttgccatatatcccatacatgttgaatatcacgcttcatttgttcattttttccgatgcactgctcaagcgtttggagttcttttgcagactggtcccatttttcttgatgttttgctttatctttcataagctgggctttcagcgactcagacatttgttcaatcagtgtcatcgctttctgttttgcctgtcttctcaaggcttcgccagcatcttttgcatattgtagtacgtattcattggagaacgtcgcaccatgatgaatcacactttcaaggagtgcttcttgcacaggtgtttcaaatgccatcacttgatttaataactcttcaccaagctgatgcttcttgacttcttttttaagcagctcagcaatatgccagtccacttcagctttcatcctcgctttgacatctgttaagaagtcggttgcccgtttttctttttcttgctcagttttatttttagcaaaaatcagtcccactttaaagccaggtgcttttgattcaatatagtcgcttgcgagttccctcattttaaatggagtgaggttggcattctttaaaatgctctcgacttcagaagatacttcatcttctaactgtttggctccattttcaatgaagtggtttttcgcttcaaactcctttacttcttttcttttttcttgaagctgtgaatcaagctcttcaccttgcagctcttcttttaacgagtcaatgtgttcttttaaaacatgctcaattttctgctccgtataagcccgaagtgatgctttcggcaacgtctgtaattcttgtagtttttcgattaaacgaatcatttcatttcttgggtgcgtctcatcggttacagatgtaaagtatagatgatcttcttcaatgccctctttaaggagcatgtctaccacttgatttttgtagtcttcaaatgctgtctcatgctcatcatgccggtccacttgattcacgatgaaataaagatttggcactttttctttaatggaacgaatgaaacgaatgttttcttcagaatgaacatggttgtagtgaacgacataaaaaagagcatctgcttgatgaagaatagaggcagcagacaaaaagtgggcatgatccgttgaatcaattcctggcgtatcaatcagtgccaccttttcttccagtcctctatagtcaccgctaatttccaccatctcaatctgttctccatccttacaaaaacgctgtactgcttctttatcataagaaccgctcatttttacaaaacggtcatcagaggtgtgaagctgcacttcaatttcccctttcctcacgacgaccaagtttgcacttgttgggattgggctcgttggcaaaatgtgatcatgaagcagatgattcacaagtgatgactttccagcagaatagtggccggtaaatgcgatatacacttcttcttctgcttcctttttgataatcgatgcaagtttggctgcgcgctcatgatcatcccttttgagaaagctttgatataaagctcctgtagtttgaacgagcgaatctcgaatagacaagtctttcatgacgataaacccctttgtttttagaaaagtcagttatgtatgtgataccattttacacaaaataaagagatttttcttctgatctgaggaaataaaaaaatctgctgcccgatcagtcgcaattgactgagatcaggaagcagattttttggagacaccttttaatacgaagccaattaataggctgtatacacacaccgtaccgagtaagaaaatcattgtcatgtgatcaccgtccatccttcatgattgagaatgtttatcattaatgaaagtgtagcacaattgataatgattttcaatattaatttagcaaatactgatttaacgctttctcctctgtttgaattcttacagccatcatccatgcatttaaacacgtaaacaaaatggcagtgacatacgcctcaaacaatagcgggatcagcaaaagctcaatcgccacgactacatagttagggtgtttcaaccaacgatacggccctttttttacaatcattgcgtttggcacgactaaaatctttgtattccagtacgtcccaagggagcataatgcccagtatcgaatgacctgtgtagccatcaggaaaaggagcagcacaagaaaataccgggacgaccccttatgtaaaagccctatctcaactatgagtgagagaaaaaaggccgtatgcatagcgaccatatagggataatgactagcaccaaattcaatggcacccatcgcttttacttttctttcatttcttttggccacaagcatttcaatgagccgctgacaaacgaagaaaccgataacaagccaaatgatcatgacaagacatcctcccatttcataagcagcagttctgaggaaaagcctggaccaagcgccccgcaaaggccaatatcccccgcttcaattgattgatgttcaaggaaatgcttgatgacatacaaaactgtggcagaggacatatttccgtgttgtttgagtacttcttttgaagaaaatagctgatcctctcgtaaagatagactttcaacataggcatcaatcactttttttcctccaggatgggcaagaaaaacggataagtctttagttgaacatccaagctcctctaaaaattgatccacctgctcttttaaccagcctgaaatcatagacggaatgtcacgggagaaaataacccgaaagccgtcacttgtaaattcccagcccatcacatcctcagaatccttcatcgtgacggattgtgtacttagtactttagggactgtttttaaatgggcatattctagtgcagccgtttctccagctaaaagagccgcagccgtcccgtctccaaataaggaggtgccgattaaattgctttttgattgatcttgcggctgaaaggttaaactgcacagctcacaggcaacgacgagcacctttgcttctggatatgcccttatgtattcataagcccgagacagccctgccgcaccacccccgcaccctagcccccagatcggtattcgtttcgtataaggagaaaaaggaagtacgttcatcagctttgcatcaagacttggggtcgataagccggtacttgaaataaaaaacagtgcatcgatctcttcaaccggaatcggctttttcagaaacgcctgctcttgaagacaatgtaagatcgcttcttttgcatgagccagtgccttctccaaatagatattgtttttctcttcaaaagagtggtgcttctgataccattcaatgggctgcacaaactgcctgctctgaatttctccattttgaaaagctctcagcagccgatcaatatctttaaacgatcgtttaaattgagacctagcaaattgagcagctgttttctgatccacgtgatgcttcgggtgactcgttccaattgaaagaatgtacgccatcggcttcacctcttttttcgttaatatcccctatcgaaaaaaggatatacatgccaaatcgtcacaattcagtcaaaacattttcctccgtctaactttttgtcttgacgacaattgataaatattggataatatagttgaaaacatgatgtagttttcctccttcacaggttcgttccaagccaagcgaacctgctttttttatgcaaaaaaacacctcttaatgagaggtgtttacataacagattgcttaggttcttctatcagatcctgccctgtttcttttttaaatggaatcatgtgataaataatatgaagcaaaatagcggtaaagctaccggccacaattccgttacttgttaataatttcattgattctggcaaatgctcaaacatttgcggcacgacggtgacacctaagccgatcccaactgagcaagcaacaattagtaggttttcctgtttggcaaaatccacgcgcgagagcattttaataccgtaggcaatgaccatcccaaacatggcgaccattgcgccgccaagaactgattttggaataatcgtcgtaaatgcagcaattttaggaaaaagtccaaataacatgagcaatgctcctgtcacaacgatgacttgatttttcttgactcctgtcaactggatcaacccaacgttttgcgagtaggctgtgtaaggaaatgcattgaaaataccacctaataaaacagcaatcccctctgcgcgatagcctttcgctaaatccttctcttttaatgaccggtttgttaaatcacctaatgcgaaataaacacctgttgattcgactaatgacacaatcgcaactaacgtcatcgtcataatgggtgcaaactcaaaggtaggcatgccgaaataaaatggttcaatcatacggaaaacttgagcgttcgccacctcagctgtttccactttccccataaatgcagcgactgctgtcccaaggagaataccgattaaaatagcgatcgccttcataaaaccttttgtgaatcgatagagcagcacaatgataaacagcacaaggaaagcgaggcctagattttcaaaagaaccataatctgcacttccttctccacctgccatattgttcatcgctactggaataagggtaatgccaataatggtaacgacagaccctgtcacaacaggcgggaaaaatttcacaagcttcccaaagaaaaaggaaagaagaatgatgatacaccccgaagcgataatacttccatagatagacgaaatcccgtatttagagccaatcgcaatcataggagaaaccgcagtaaatgtacagcctaatacaacaggcagaccgataccaaagaaacggtttttccatacttgaagaagtgtggcagccccgcacatgaaaatatctgccgagattaagtaagtcagctgtgcaggggtgaggccgagcgcatctcccacaatgagcggcacaagaacggcacctgcatacatcgccagcacatgctgaatccctagcgagagcgttttggcttttttagcggcactcatgattgtacctcccgtacaaacgtgactttcccttcctcaagtgattcaatacgtgcaagggactcgacgcggtagcccatttgaacaagcgcattccttccgggctgaaatgacttttcaatgacaatgccaaatccggctactttcgccttcgcctgctttgcgattgcagcaagccctttagcggcttcaccgttcgctaaaaagtcatcaatgattaatacacaatctttttcactgagatgcgtatttgaaacagcgatcgtgctttctacttttttcgtaaaagagtacacactcgctgttaataggttatctgttagtgttagtgattgacgttttcgagcaaagacaactggtacttgaagagctagtccagccatcacagcaggtgcaatgccagaagattcgattgtgacaatttttgtaatgccatcatgcttgaataatctagcaaactcttgcccgatctcatgcattaacacaggatcaatttgatgatttaaaaaggcatctacctttaacacttgatttgacagaacgattccttcgttctcaattttttgacgtaacaattccatcattcttcctcccagcatattggcaaacattttaattttttgcataaaaaaagcattgctgtccatgaggagcaagcaatgcgaaaacgatccacggatcttcagctcaaacaagagctgtttcattttgctcactcatagtcggactgtatcggtgtccggtagaaacttgcgtgccatcatcacgcgattatatgagtgttatagtgttcaaattataacaagatttcagacgcttggaaagcacttttccagaaaaataccgaacttaaataatagatcagatcaaaacgttcgtttttagaatattcaagcatcaaaaaagcacccttctgagcaaagggtgccttttatttaagataaatacaatttcgtatatttatctgttaaataatcgattaaatattgcacatttaattcctcaccagtcgcatcttgaatgatttcagatggttttttgcgttttccatgctggtgaacatgttctgtgagccattcttttatcggtgcaaaagacccgttttgaatcagcccatcaaaattcggtaaatctttgatcatttggtgctttagttgcgccgcatacatataaccaagcgcatatgaagggaaatatccaaagcttccatcagaccagtgaacatcctgcaaaatgccgagtgcatcattaggaggcgtaatgccaagatacgctttatatttttcattccacagtgcaggcaggtcttcaactgctacttcttcattaaaaatcgctttttcaatttcatagcggatgataatgtgaagcggatacgtcagttcatctgcctcaattcgaatgtaagtcggcttcgattcattcactgcatgcacaaagtcttctaaagagacatctttaaattgctcaggagacgcttcttgcagcttatgataatacgttttccagaaatcttcatgtctgccgataaaattctcaaagaaaagagactgtgattcatggatccccattgatgtgccatcacataatagcgttccgctcagtgcctcatcaatgttttgctcgtagatggcatgaccacactcatgaatcgtgccaaagatcgccatccgaaaatcatgctcatcataacgggtcgtcacacgaacgtcccctctgctcaatgtcacagcaaacggatgaaccgttgtatccagacgtcctgcgtcaaagtcataccccaattcttttaagaagaagagactcagttccttttgtttgtcgatcggaaagcttttcgataaaaatgaagtatccggcttatgaggagaggcttcgatttttttcacgagaggaacaatggcatcacgaagtgcaccaaacttttgatcgagctgttcaactgtcatatctggctcatagttattgagcagcacatcgtatggcgtttgtttcacgccccaatattgaataaagcgcttgttaaaatcaatgagctgttttaagtatggtgcaaagagtgaaaagtctgatttctcccttgcttctacccagacatgctctgcttttgattgcaaaatcgagtattctttaaattcttctttcggaattttgctgttttcatcatactctttttgtgataattcgagcgccttttgtgtatcttttgacagctcatctcgatgtttgtttaatgcgtgaagaagatctctcatttcatcagaagtcttcatattaaaaatatcacttgataattgaccgatcgtttcagctctgaaatcggcgctttttttaggcgcctgtgttctagagtcccaataaagtaaatggagcgcctccgtataatgggcgatttttcctagtaattgataaaacgctttctcttttgcttcaagactcatacgtttgttcccccaatcaataaaatatgtatgtacgtttcaaggctacttcaaggaatgttcttttgtcaatgaaaaaggaggatactcagatggtatcctcctcttttcctcgttcgggcgttatttaagatatgatgattggcttgactggcagaacggattcaattttactttgaagctctgtatcttccttacggtcaaaataaatatgaatggttcctgcatcttggcttgtccgaatcagccttccaataccttgtcgcaagcgcagcagcatatacggaaggtcaacttcagcacgagcatcctttgcttcattccgttttgcctcaaataccggatcatgaggcgggtaaggaagtccccagatgatcacatttgttagtgattgtcctggaatatccagcccttcccaaaggtgaacagagcataacacggatgtctcatctgcttggaacttttgaacaatcgtgctgatttcctcgtctccctcaaaatacacgtcgaaaggcagtgattcatccgatgcctcaagctgctttctaaagaaatgaagttcatcaaatgaagggaacaaaatcagagatcgtcctccgttttctttcagctgagtgatcacttgctgtccttttgcctcttgctcttgaagctgctgaatcccgtggaaataaatcttcatttgctcatcgtaatcatacggagaagcgacactcattgataagtaatctttgatcccaagactttcagctaaataatcaaaggattgattttcagacaatgtagcagaagagaaaatgtatggtcttttttgcgagaatactttttcaccaagcacctctgcgactgtctttggcatcacaacaaatgtcgtatctaactcctgcttttcaagccagctaatcgcatttttttgatatagcgacagagaatacgccatttgttcaatgtactcttccacaacagacaattcgtattgatcgattgtatacatctctgattcaaacacgagtgcttctccgattttttcaagcaaatcacacaattcacttgcagaccgcttcacttcatccacacgtccaatttcaagtcgatgcgagcccttgatttctttggcatgtgtttttaagagatagaagaactcatcgtttgtggcaagtgcatcttcaacgagctcggcaaactcttcacgtatatcgttttgcaacaggcgctctaaaaatgtttcgagcattgattgcttcactcggtacgtcagtgctttttgtgcggcaaattcaagaaggtgtccttcatcaaatacgacggagctatgttctggaagcagcggaagctggccctcgcgtttgcgggattccttcgtccacacatgctccatgtaaaaatcatgagaacagatgatgagatcggttgctttccggtaatgatctcttgataaattcagaccgcagcgatgacgcatatcgcacgtcaagcagtcttgaaacgagtcatagccaatacgtgaccattcatcatttgatagttctggatactcttttcgatcaccatacggataaaagttttgcatgccatgtgattcatgaacaaatgaaggaagcgattcataaatatcgagccacttctcatcatcttcacgctgcatggttttctctagtttctttaagcataaatattggtcatgcgatttacttaatctcgcatctatttgaatatcaaggtgattggcaattttatagatatcaccctcttgtttcaccagctgttcaattaacgtttcgtctgcacatgcaataatcgcaggtttccctgtataccttgcatatgtgaccgcaaataatagatagacgatggttttgcctgtgcctaccccagcttcggcaaacatcacacttttttctttaaaggctctttctagttgaaaagccataaatatttgttcatctcgaagatcaaagcccttttctggcaaaatgtcatagaacacatcaccaatccagttgcccagttcttcgtaaaaattatgttcttttgataatgaaaaaggcaaacgagatgctgtcacctgcttcaacccccaacttttgaatcattcagacattcaatagtaacatttatgctggggaatgacaatcttttttacgaccgcaaacgatgttgataggtttctttcattaaaaatgcatgctctgaacgctctatgtaagcctgagcaagcgctaaatcttcgatggctgctgtcagctgagcagattgtccaccttcttgcccttcaattttttgagcagtcgaagcgagtgctttttggattaactgaaattgatcatattgtatcatggagacacctctttttttaaaatcaagttcagtttattccgtcccgtgaaggtttatacctttctgcgataaaaaaagccacaccttctgtaggtgtgaccatttttttatgattcagttgtctgttttctaggcgggcgttttccccaatattggtaatagtctgttttaataaaaccattaaacagttttctctttttcgttgcttttctgccgaagcactcttcgaacttttcgtgtgacgttaagatgtaaatggaccaagtatctaggctcttaaatgcttcgcccattccttgatacattttttcaacagctggtttatcactgagtcgttctccgtaaggcggatttccgacaatcacaccatactcttctttcgtttgaaagtctttcacttgcatttgtttaaattgaatcaattcacttagaccagcttcttcagcattcatttgtgcaatgtctaccatccgatggtcgatatcacttgcaataatgtggagcggctgatcatagtttgctttttcttccacttcgtgacgcgctttgttccaaacgtcttcaccaatccattcccatgactcggacgcaaattcccggttaaatcctggggcaatgttttgtcctatcatggccgcttcaatagcgattgttcctgacccgcagaaagggtcaacaaacggacggtcaggtgtccagtttgttaatagcacgagtgcagcagcaagggtttctttaataggtgctccgccttgatccatgcggtaccctcgtttatgaagacccacaccagatgtatcaagcgtgagcacagctttatcttttaaaagggcaacctcaattttatactcaggtcctgtttcttcaagccattcagactgtatgttgtaagaggatatgagcttttgcgcgatcgcctttttgacgatacgctgacaatccggcacactggcaagctgtgatttcacagatttaccgatgacagggaacgtgctgtttttcggtaaaaaagcggaccagtcaatcgccttcgtccgttcaaacagctcatcgaatgtttttgccgaaaattcagctacttgtaccttaatccggtctgctgtacgcagccaaaggttcgcacggcaaatcgcaagagcatccccctcgaaaatcacttttccattgtctactgtgcagtcatagccaaggtctcttacttcttttgcaacaatcgcttcaattcccattggagctgttgcgatgagtgtataggttttcattgttttatcacctgttttctcgtccttttatgtattcaagataaaagctctccatatgttgaaataggagagctttgttttcatcatgtttataataacggatataacgttctgtaagccatgttttgttccatcgtactgcaaacggcaaatgcctcgtactcaggtggtaatcatctatctacagaatactctgtccttctctccgtttggttcctttgagaaagttcccctaccaagtttgggtttctcgctcgaggggtttaccgcgttccactctcaccatttctagtgagacttcgtcactgtggcactttcaaggatactttgccatatcctaaaaggacgtaggcatttttcctgccgtcagcctttcccaggctgccctggcttattttttcgccaggcacgaacactacgggcatctcagcaccgtgcgagcatggactttcctctgcaatgtctaaaagcattgcagcgattacccgaacgttaatcaataatcgttattataaacgacaatgacatcaggcacaagcttttttcagcaaggctcaatcataaagtttgctgccgaaaacgtgtttctcaaggttagatagtctttttaaaatatcaaagtttgttgtattagactgtgcaggctgtctttttccttgctcaacggcttcttcaagctgcttagacaaatggaggttttcttgttgaagcttttcgatttcttggttgaatgtctcatagtctttaatgaccatatctaaaaatttatcgacttcttcttgtttgtatcctctgacacctgttttaaattctttttctaaaatttctttcgcagaaagctttactttatcagcaagcatctttttcacctcatatcgtgaattcatagtatattttttcagaaatacgtgacgttgtcaaattttctcttgcttttagtcaaaaaacggatcttctgcctcaacttgcgctctcaaatcatccattgtgatgtacataatggggtaatcggtataggtttccgcttctttgatcatgtactttggcgagccatcatgctcaggatcataaagggcgagaaggccatctgttttttcaataaaaaaacggttcttttgtttaaattgtgccggactttcatacggtctatgcgtgacactttctacaaaatcggcctgtgcaagaatcccttcatacaactctttgttttgttcattccagcgctcttcctgttcataaaatggtgtaatgacggccagttttaacgctggatactcctcttgaagctcaaataccacttcggcagtccagatttctgccccaagctggcctgatatgagaacccattccaggccttcttcaatcagggctgtcagccttttttgaagctccgcttttatgtattgaagtgcaggctcgtcttgtttgaatatcccaagctcaaatggcttgtaccctgtgacagcaataattttcattttttcacctgcttttaaaaaaagggacttctaaaagtcccatttcactttatctgttacagcaaggtccaccgcagttaaagtgttgatgtgttgccgggtccacctgagaaaacgtatgcgggaagtagtgaacatgtttgaaattttgatggtgaacatttgtcacatgctgcggatggatatgcggcacaattgttgttgaatcgctgtgtgtacagcaatgattcgtcggatgaacaattggctgtgtaacattcggctggcaatgatgatgatggtacatgtagcattcccctctccttaattttcttacattaacaatgtatgaattaagaggtgtacatgtactaatgcattaacctattttaaaagtttgcaagaaaaacatccttatagtttgaaaacacaaaagcgaccaaaatgacaacaagaaaaaacaagtagaaaagacctttatacatgctctacgctcctcattcaatatctaacgttattttacaggattcgtgacttttctacaataaaagtgctaaacaatttttattttcggccgagagccgaacgttgtcatgttttgcgctttcccgggcaataatgttcattgcccagcttttctcaagagccgtttttttcgcttctcaagttcttccgtgtctcgctgacttaacgatgagaaagataataacgattcagtgatggatagagctgaccttgcatttttttgacgatgctctttacacttcgcaagctctatacccgcttttaatgctaaatggacatcgcttgatttaaataatttttcccatatttgaaccgcttcatcccactcgttttgtcgtttatattgtaaggaaagatcataagacgcctgattcgcatgctcaaaatcagcatccgttaatttttgcaaatgcttcgttgcttcctgtacatcacgatgagcaagatgccacctggcgagcgcatacttctcattgtgttcctttaccgcatcctcagatagtatttttttggatagatgaatgtagaggctgattaacgataagacgtctagttcattatgagtcaagattccttcaatcagcttcggattttgttcctttaaaaaatgaaaataaatcatcggtgccaaaaaccccggcgtgtcgttttcacgatgcacgtgcagctcttctttttccacaacggatagcgccattcgttcatatttatgcttccacaatcgtctagatccgtgcagaagatcaaaatgtccgaattcaggaagtgcagggatttgatctcgtaagagcgtatgtctcgttttcacttgcggccagtcgaacgatttaccattatatgtaaccaatgattctacgtttacttcatcgagaaagcttttgtacagagccgcttcatttcctggattggtgagcaggtgctgtttcaccaccactttgtcggaaaagacacgtgcatgtccaagcaagaaaatcatatttcccgtaccgccagataatcctgttgtttctgtatcaaagaaaaacagctcgtgcggctcgtaccctttagccgatagcgaatgctggatgccgctttcgttccatgcctcgatgatcttcggcagttccgcaaacgaatagcgcccatgctgatcttctaatgaataggtgacttcccgaatcagacaaaaggaaccctcaaagtgataaggagatacacctaatgtttcccattcttttaaaaatgggatattttctgaagtcacaggctgtggttgtccttctaaagttttctgccggttttcatgtgtctgattgtgcgataggtgcttcttcattctgtttaatttcccttttaaagacatgagcaggtgtccccctcctttcccttaaaatacggacatcaattcaacgatgctgctttttccgctcacctctttcatttccatgccaatgcaggatggacagccattttcacagcggcaccgctcaatcagctgaatggctgcgcctgctatttcatcgaaacgagcttgtacttccttgcttaagccgattccgccagggtagtggtcatataaaaagaccgtcggttttccggtatgtgccgctttaatttgtgaaacaacatgaatatcagaacggtcacacatcacaaaagcaggtacaatgtgctgaagaacatttgcgatgccaagcagcagctgttcaagtgttttctcttcaaatctccgctctgcttcatgtaattcaaaccaagcagcactcgtatgaatttcttcttccggcaagtgaatcggtccagagccgatattttcaccggtacttagccggatttttttaaaaatcgtcggcattgcgttgacagtcacatcaccgtagtgaacagatacggcttccttctctgtcgtctgatcgatttcaagcaccttaagttgaacagctaaattcgcatccgtataatattctacatctacttgtttcacataagccttcagatgctcgtaatctagcttttccacttgatactgaaccccttcgtgtaaataaatggcttcatcatgaagcagcgtcatcgcactgaatcgatccatctctccaataatccgaacattcgccacatctgattgatccacaatcaccacattttcctggcttgcagaccggaggctgatgccatgcgctgggaacgattgatctgaccaataataccggttcccgctaaaatgaagaacaccttcctcatgtaagtattgcaaaatctcttctacctccatgccgccaaactgttcatcctcccgaaacggaagctcgtaggatgcacattttagatgatccactaagataatgaggttttcagggttgattctggcagcttcaggcggcctgttaaagaaatattcagggtgtctgacaatatattgatcaagaggtgaggagcttgccaccataattatgagtgcttcctcatgacgccttccagctcgtcctgcctgctgccatgtactcgctacactgccaggataccctgtcatgatacagacctttagctgacctatatccactcctaattctagtgcgtttgtgctgaccacacctagaatgtctccttctctcaatcctttttcaatcactcgccgctcttttggtaaatagcctccgcgatatccacgaatcgattttggaccgatctcttttttcactagctcttgaatatggcttaaaatcacttcaactcttactctgcttctagcaaaaacaatcgtttggattttttctttcaaaaaagtttttgccaattgattgacaacagtggcggcactttgtctaatatttaatggtttattcacaactggcgggttgtaaaacacaaaattctttttaccgctaggtgccccgtttcgttcaatcagatgcaccttgctccccgttagctgctgcgctagctcttttggattcgcaatcgttgcggaagtacaaataaaaaccggttcacttccataaaatgcacaaattcgttttaacctgcgaatcacattggccacatgactgccaaatacacctcgatatgtatgaagctcatcaatgacaatatacttcaaattctcaaacaagctgacccatttcgtatgatgaggcaaaatggctgaatgcagcatatccgggtttgtgatgacaatatgtcctgcttgtctgactcgctgccgaatggccggagaggtgtctccgtcatatgtttcactatgaatcggaacatccatctcgtggatgatctcgttaagttcacttttttgatcttgtgcgagcgcttttgttgggaataaataaagggagcggcttgtctgatcttctgcgatcgactgaaggacaggcaaattgtagcaaagcgttttacctgaagctgttggtgtgacagttaccacatgatctccatccatcacacgttcaaaggcttccttttgatgaatgtagagttcgctcacgcctcgtttctcaagcgcctttttcagcctgtcgttcactctttcaggaatcggagaggtctgtgcaggcttcgcatcaatttcatgccaatgttctacctgttcgtctttctttaattcttctatgagttcgttcattgttttctttttcatatcgcatcacctctcttacatagtttaccgaatatttgtttgcatgactaggcggcaattttttgatgcgcagcctatgagcaaatactttgaagtgttgtaacagtatctattacacttctatagtgaaatgattttatcaaggaagaagatgatgagagtgaaaaacgaatttaagcctttatttgaaccatttacgtttccaggaggtgcgtctattgatggccggttagtcgttgcgccaatgacacacttcggttctcacgaggatggcaccatttctaaagaggaaattgatttcattacagctagatcaagtgatatgggcatggtgatcacagcatgtgcaaacgtgactccagatggtaaggcatttgaaggacagccttctattgcaagagatgaagatatacctggcctgaaaaaacttgcttctgcgattcaggcaaagggaacaaaagccatcattcaaattcatcacggcggttctcaggctctccctcacttagttccaaacggtgatgtggttgcgccaagtgatgtgtttaaagatggaaagcagattgcacgcgctttaaaagaagaggaaattgtccatatcattgactcttttaaagaagcggcaagacgagcggttcaagcagggtttgacggcgtggaaatccacggtgcaaatggttatctattacagcaattttactctccgcatagcaatcagcggacagatcagtggggaggaaatgaagaaaagcgtctagccttccctatcgctattgtggatgcagtcaaagaggcaatcgaaaagcatgcaacaaaaccgtttatctttggatatcgattatccccagaagaaccagaaacacctggtttaacaatgacagagacgtttaccttagtggatgttctcaaaacaaaaaacctcgattatttgcatatctctttaatggagattgactctaaagcaagacgtggtgcagatactcataaaacacgtatggagctgctaaaagaacgctgcggcgatacccttccgctcatcggtgtgggcagcgtcattacagccgaagatgcactaagtgcttataatcaaggaattccgcttatcgctgtcgcacgagagctgatcgtcgacccagattgggcaaagaagattaaagaaggcagagaaagcgagattgaaactgtcattaaacgcagccaaaaagataagtatttgattccagaaggattgtggtctgtcatggaagcgagtcaaggctgggttccgatggaagattaatgtcatcaaaaaaactaccctcatacgattgggtagttttttttgtgtcctgattattttagtttaacggtaaaaagcttagaagtctgtttttccacaggtccctttggttctttatcaagatgctcgatcaagtcaccattcataatgacaatcggagtcactgtacttgccgctttctcttcaatcagttctaaatcacacgtaatgagagggtcaccgatcttcactttatccccttcttttatgtgcgcttcaaatccttcaccatttaatcccactgtttcaagcccgatatgaatcagaagctcaagccctgagagtgttcgaataccaattgcatgttttgtatggaagagctggatgatttcaccctctactggtgacacaatcgtgccactttttggttttactgctacgccgtctcccatcatcttttgagaaaaaacagggtctggtacatccgtcatatccattaactctccatcagctggagaataaatgatttcttcctttacatcatcttggttttttccgaaaccgaataattttttcagcaatgtcaattgctcccttcaagctttgcttctagttctattccgcgtatgaaacgctgcgctcatacaccttgcttcattcaacactatttaatcataattttttcctctcatcaattgataaccgcctgagccctttctgcataggctgtagatgagaggtgattcaaatgaaacatgaaggcgaaaagaaacatgaattgctggcaaatgaagatattctcaatgaagcgattgaacaatttttcgcatcctccccgtttcacgagataataaatagtgcggaggcgctcatgaccacatcacattcacttgcatcgattacgaccgatgtgacagaggatgagcagtttgtgtatatcgagatccaatttcccgaccattttgtcgaaggggatatcgcgctagaagtaaaagcccaatatttacacttatccgtgcaggaaacaatcaaaacggatacaacttcctcgtattcgagctttaccaaaaccattttaatgccggcaaaaatagatgaaacgaacatgaagagcgtgtggaaagatcaaacgcttcgtgtgacggcaccaaagcaaactacccaataggtccatctattgggttttaactatgctttaaaaatgcttgtaaatcctttcgctaatgaacctacttgattcatcgtactcatcatttgcccagctgtatcaaacattttgttaaagtcgtattgtccattcgtttttttgaattgtgacagcacacttttaaattgagatgattgctgtttttgcggtcttggcaaaggataagggttcataggctgctgcatgggcatcatgcctggtggcggcatctggggttgattgatcgcttcaggcggatgaaaaggcggcacattttcttggtatccataaggcggctgatagacagcagatggtgcctggctcattccaccttgatgtggcggcatgaaatattctggaggctgcggaggctgctgcatatctggatacggaaaaggccctcgattgaatggattgaattcataaggctgctggtttgaataagggatcatatatctcgctcctctcgctctcaacacatagagatgtcactcatatattatgatcaagaacagaagatgtgcctaaagcagccataagaaaaacgcagcatatgtcttcagctgcgcttgttgatttcttctattaaaaggttcagtgtgtaaatcactgactcaactaaatttttcacacggggtgcatgctgtttgccaaaataagattgcaggacaacctcttttccattttctttgacggcttcaagctgttcttggtgtaaatatctaggtttgaccagatgaataaacgagatcgcagcagtgagccactcttccattttctgatcaaatgtctcaacggccggctgaatgtccgtgtgaaaatcatatacggggtattcctcttcagcctttcccttttggtactgctcatacgcctcttcgatccatattctcagatcttgtgtatgttcaagtaatgtttgattatccaaaatgttcacctctatgaaccatcctatcaaacgtttacttattgctcaaatagaaaagctatccggcgtgatatgccggtcttgccgccagtttatactcagccgcgtgaatcttcacttcacagtcctttacttctgattcaagccggtctatcatttgttcttgctcctctatggctgcacgttttgtttggttcacagcaagagacagttcttcttccaccgcatcaattttccgctcgatttcctctaataactgcataatggattcttttgatacaaattcgctcatcatcagattcctcctttatcgtctctcgttacattctcttttctttcacaccctccttcacacatgacaaaactagaagcaaatcgccaatctaagtgtagatgagcgctatttcttccttttcgacatatgcttgtccttctttgtatgattgcgtccgattgtgtaaattctaaggacaaaggaggtagatttcatgaaaaagcagccagcaccaaaagagcaaaagccaaaagggaaagaaaacagtacagatcagcttgataaaaagctcggcggtcctaatcgaccatccacgtaaaaaaagcaggtaccccctgctttttatttatgcaaaaaatagtgctctaatgagaaaagaaaacgaagctgtctttttttatgaaaataccagtcggtcagctcaatttgttttggtaacgtttctgcatcaaataaggatgggctcaatttcttttgaaaccaatcgtccctttgatcgtctaatgaatgtgtcatcaccggataaactgttcgaagaaaaggtgttgacctcctagcgatccctaaaaacggctcaaaatcaaaccgtgatccggtatgcggaacggtatgcaaaaaatgataaaaatccgaaaataaatcggctcgaaataatagtttcgctagtttttttcctaatgtaatacgctcctttacgcgggaaaacttccgtatggttaacccgtacaaatgcccgtccaccgttggaaaaacaacggtttggaaatgtccccactcgctgaacagatattgaatcgagtgaaaaacattctttttcagaagaggattttgtataataggagattgtatagtatattgttcatttatgatgagtgcataaagcaggcgctctgtgtcaccctttagccaaaaacgttcccactcagtgctcataaaacgagaaacagaaaaatatggaagcagatggaacaagggtttgctgcaccgcttagaccattcatacaaaagaagctgagggtaagcatccgaaaagatcagccaattcgctctttcatatgctgtgaaaaaaaggtgcccctgctgatctgttaaacctggatggaagagctcacccttaagatccgtcatagaccatccagcatttctcgagacaaaggaagcaagcagcgaccatttcatctctggatggcggtcataaaagcgtttgtaagcatttgtcctcgtcaggttgtctttattttttgctttcgtttcacgcaatatatactgagtgatgatgtgctcttcttgtgacaacatagtaatctctccaatacaaaatgcattaaaaggaggctgaaacttgatgattcggtatccaaacggaaaatcgtatcagcccattcaacaaattgggacaaaaaaaagaatcagcggcgaatcctcttatagtaaccgcgggatgacgcttgaggctgacttaaatgaaaccaaccagtactatttggtcaacgggatcgcagtcattcataaaaagcctacccccgttcagattgtgaatgtggattatccaaaaagaagcgctgctgttatcaaagaagcctattttaaacaatcatccacaacagactataatggagtgtacaaagggcgctatatcgattttgaagcaaaggaaaccaaaagcaccacctcgtttccactcaaaaattttcacgatcatcaaattgagcatatgaaacaggtagaaaagcaaggcggtatttgtttcgttattatatccgcatttggctccgtttattatttgtccgcttcagatctctttttcttctgggagcggcagcagcaaaacggccggaaatccattagcaaagacgaattaatggaagctggccacttaatgacacttggatattcgccaagaattgattatattaaagtagtggagacacttcatttttcggatgaaagtgagtagcaatgacgttcgaaaaaggtttaacacgaaaggttgagatgtgatgtctgatcaatttacaagtcgtgaacagcgacgtaaagcaagtcaagaaaacaataagaagcaaaagaacaaaaaaggcaaaaagaaagcaggtctatttaaaaaaatatttttatctttactcgtgatcggtcttctttgtgtagttgccggaatcacaacttttgccgtttttgcatcaagcgctccttctattgatgatagtaagctcaaaacaccgtattcttcaaagctttatgacaaagacaagaaagtgtttgcagaagtaggtgcggaaaaaagaacgtatgtctcgattaaagatatacccgatgtggtaaaagaagcatttattgcaactgaagatgcgcgtttttataaacaccacgggattgatccaatccgtatcggcggtgcccttgtcgcaaacgtcgaggacggctttggagctgaaggtggaagtacgattacacagcaagttgtgaaaaactctctacttaacaatcaaaaaacgttaaaacgtaaagtacaggaagtatggctctcgattcagcttgagcaaaaatactctaaagatgaaattttagaaatgtatttaaaccgtattttcttctcgccttatgcttatggtgttgggaaagcggcagaacaatttttcggcgtgacagatttaaataaactaactgttgcacaggctgccacacttgcaggtatgccgcaaagtccttctgcctataacccagtgaaaaatcccgaggcagcggaaaaacgccgtaatatcgttttaggcctcatgaaaaaacaaggctacatttcagagaaagactatgaggatgcaaaagctacccctgtcagcaagacggtcgtctcagctgataaatataagagccagaactcaagtaagtactctgcttatattgaagaagtcatggaagaagtacagaaaaaagccaaagtggatgtatcaacagatggattaaaaatctatacttcactcgatcgaaaagcacaggatcacctagatgatattatcaatggggattcagttggttttacgaaaggtatgcaggcgggtgtcaccctgcttgatacgaaaaatggcgaaatccgagctattggcggtggacgtgatgtaccagccggcggctttaactatgcgacagatgcaaaacgtcagccaggttcaacaatcaaaccaattttagattacggtcctgtcattgaaaataaaaaatggtctacgtatcagcaaattgatgatgcgccatatacgtactcagatggtacaccgattaataactttgacagaagacatttagggaaaatgtcgatgagaagtgctttggcacaatcacgaaacatccctgccttaaaagctttccaagaagctggcacagacaatgccgttcaattcgccaataacttaggtatggacttaccgtctgacattccagagtcatactcaatcggtggatttgacgatggtgtctcctccctgaagatggctggagcatttagtgcattcggtaataacggatactataatgaaccgcatgctgtcacgtctgttgagtttaatgacggaacaaagcttgaccttacgccagattctaaagcggctatgagtgattacacagcatttatgatcactgatatgctgaaaacagctgtacaatctggaacaggtacacttgcacaagtaccgaacgttcaagtagctggtaaaacaggtacaaccaactttacacaagatgatatgaataaatacaatatcccttctggcggtgcgaaagattcgtggtttgttggttatacgccgcaatatacagcagccgtttggaccggaatcggtaattcaaaagatgcggacggcaaaatgtggctcacaaattacgagcagcgtgttgccaaaatcgtcttccagcgtttaatttctcaaattgatgatggaagcggctcatttgaaaaaccagacagtgtcgtggaagctacggttgaaaaaggatcagatccagcgaaattagccggaccaaatacaccaagtgagaagaagacaacagaatactttgtcaaaggaacggttccgacaaaagtgtctgaaacatatgagaaaaaagaagccgataagccttctgacttaaaagcggtgtatgatgaagagaaaaaatccatcacactgtcttggggctatgatgacgacgcagatgctacatttaatgtgaaacaagcagttgataatggcggctataaagagattcaaaacagttcttctaaagaagcggtcatctctgatgtgaagcctggctctacttataaattccaagtgacagccactgtagaggatgtcacaagtaaagcagcttctaccttcctcaccatcaaggatgatgaagatgaggaagaaaaagcagatgatgagaataaagaagaagaagaaccgcagcagcctgacgacgagcagacagaccagactgacgataacaaaaatcaacccccaggcactgacgagcaaaagccagatgataaaaaagatcaagatcaagataaggatcaggatcaaggcggaaatacggaaaatggaaataatggttcttccgatgatggctcagacagtacaaatgggaactcacaaactgacaataaagataaaaagaaagatgatgcgaaaacaaactctcaaagctcaaattcgcaatcaaattctcctagtcgaaaagaaaatgaataatgaaaaagcacttgcccatatggcaagtgctttttttaacggttttgtctgatctttttaagtgcttcatgttttccatactgcttttttagttccgtgtatagctcgtccagttgaataaagcaatgatattgagttggttttagcaaaatgaactctaaacgttctgtccaattaattggagctacaggaaaagtctcttgcttgatatgttcccattcaagcgtttgaagtctctcccctttgatccagtaaaacatcgcaatcatactgacaataccttgcagcatatcatcttcttcacaccgggactttcttgtttgaaaacgaggaagcattttttcttttaattcattccacagttcgaacatcacaggaacaaattcttctgttttctgccatggaagctcatctgttaaaagttctgatgatagatcatatgcgagtggattatctctaagtatgtctactcgatcgcctttcatctctacctttttcccttttagcttttcgacatatgaggtaaaaacagctgccccgctcatgccagcttcaccaatccttttttcagcctcttctgcccttctctacacatatcaagaagcggacaggactcgcactgcggccgctgcgccttgcagtgatatctgccaaaaaagattaggcggtgatgcgtcacagaccaatcttcttctggcacctttttcattaaggtttgctctacttcaagaacagaatccttccaccggcaaatcccaagacgcttactaactcgttctacgtgtgtatctacagcaatggccggcactccaaaagcgacagatacgacgacatttgctgttttccggcccaccccaggaagcttcacaagctcgtcccgatcctttggtacttcaccgccatattcttcaatcagcattttactcaacttttgaatgtttttagctttattgcgataaaggccaatcgaacgaatatcttgctgcaattcatcaagcggtacacttaaatagtcttctggtgtttgatatttttgaaataacgttttggtgactttgttgacaagcacgtctgtacactgcgcagagagtgccacagcgatcacaagttcaaatggattggaatgaacaagctcacactcagcctctggaaacatatctcctataatatctaaacattcattgatttgtttttttgataacatgacttctcctttattggttattgttccagccaattataaaaaggaacttgtcgtttatatgttgacgtctcttcttttgaaggtggcgctttttgctgagaacggaaatgctggctatgctcttttgcttcttccgctgttttcagccctttctttttccactcaaacagaattcggtcgatataacggaaatttaattttcctgataaaaccgcttctcttaacgctaggcgaatcatttcagcatcatgatggtcttgatccatccagatcgagagtgtttctccttcaagaggagacagcggtctgccaaattcatcttcaaatagagcatataaagacttttcagcctgcacatgaagtttttgaccttcctttgcttgttttgcttctaaaaagtcatacagtacgccccataaaggctcaactgagtagcggtcatgctgaataccagacccgtcctcaaacggctgaatcgaaataaatcccttttgaattaaatgctgaaccatatacgcacactcttcagctgaaatggtcatgccatgggacagctcttcaaatgtttgaaagaaaacaccttgttcttcattcattttaatcttgagcatcaccatcatttgtgattcattcagtcctaactgctcataatgagcaatcagcaaattaggcaaactggtcgaacccatttgctgcatattaataaattgctgcctattcatcggatacacctcttcagtttaagtatatcacgttttatttcacgtgccccttcaaaaaacgtttgaaaaagcctccatatgttggaggctttcatgtcttaaggatataaacggtttaataatcttgggaaaggaatggtttcacgcacatgcggcgctccactaatccaagcaactgtacgttcaagtccaagaccaaaacctgaatgcggtacagaaccatattgtcttaattctgtgtaccatttgtaagtttcttgatctagcccatgttctttcaatcttgcttcaagcagctctagatcatgcacacgctcagaaccgccaatgatctctccgtagccttctggtgcaatcaagtctgcacaaaggacgacatcatcacgatccggtgcaggctgcatgtaaaatggttttaatgatgttgggtaatgagtgataaacactggtttatcgtagctttcagcgatcgctgtttcgtgaggcgcaccgaagtcatctccccattcaatatcgtcaaagcctttttcctgcaagaatttaatcgcttcatcgtaagtgatgcgcgggaatggtgctttgatgttttctaattttgctgtatcacggccaagtgtatgcagttcaactttacagttttcaagtacactttgaacaacatgagtcacataatgttcttgatactcaaggttttcattaaattcgacaaaagccatctcaggctcgatcatccaaaactcaattaaatgacgttttgttttagatttttcagctctaaatgttgggccaaatgagaatacttttccgagtgccattgccgcagcttccatgtaaagctgtccactttgagaaaggtacgcatcttcatcaaaatatttcgtcgcaaacagctccgttgtgccctcaggtgcacttccagttaaaattggcggatctactttcacgaaaccttcttgatggaagaattcatatgtagcacgaataatttcgttacgaattttcataatggcatgctgctttttagaacgaagccataaatgacggtgatccattaagaattctgttccatgctcttttggtgtaattggatagtcagttgcttcgtgaatcacttcaatggatttcacttgcaattcaaaaccaagaggtgaacgctcgtcttttgtcacttgtcctgtcacatagacagatgtttcttgagtgactgatttcgcaagcttaaagacttcctcttccacttctgcttttactacgactccttgaataaagcctgtcccgtcacgcagctgcaagaatgcaattttaccgcttgaacgtttattggcaatccatgcgccgatggttacatcttcatcgacatgtttgaacacttgattaatcgttgttttcaacataattccctccaaagccagaaagaagctcaccttttcgccaggtgtgaatcttttttcatacattttattataaccgttctaaatcagcatggtcaacgcaagacaggagaaactatggcgttacatttttttccacgtgtcctgtcgagaagtcgacatagctgaagctgtattgattgttttcatttaagtacgtcacttcccaaaggagtacgtcaccttctcttgctaattgaacgtcctttagcttagatacagtgttctccttttgaacggcttgtactgcttgatttgaggtaatgccttcttttgctttttttgcgatcactttttctttattgctggcaggtacccaaacataggttgtttcattttgtttgttttttccttcaacaataaattgtttttctttcccgacaaaggtttccacttgctccacttgtacgatgtttgcttgtttttttgctcgttcaatcgccgcctcatgaccttgttctttttgtcccatggcaatctgataaatccacgtaaaactgatgatgccaatgagcaaaacgagagccacaacggatgaaatgatccagactatttttttcatgtcaagcttcccctatgtgcgatatatcgtaaatatcgcttgattttgatcttcttgatctaatgctaatccaaacatgagatcttctcttttaagcgttctgttcaataagtcaacaattttatacaggtcctctgaatgcttaatttgaacagttgaaagtacctctattttactttccacttctaattcctcctcggtacgtaaatattgttaatcatacttttcggcgcgggaaccgatactatttttacaacggaacacaaaaagccgttacgataaattaactccaaacccacaccagctaaaggccgcttatgacagcggcttttcgttgttgagcttctctatatacgcctcaagtgattcttttgacatctcgtggactggcgcatgagggagtgattctaaaaatagctttccatatgaagcggttttcactcggcggtctagaatgagcaatgtacctatgtctttttcagagcgcagcaagcgtcctgcaccttgtttaaaggttagcacagcttctgggagagcaacggctttaaacggattcttcccctgttttttagcggcatcacattttgcttcaatgagcggtgaatcaggcggcctgaacgggagacgtgccataatgactgttgtcagttctgatccaggaaaatcgacaccttcccaaaaactacccgtaccaagtaaaatcgcatgttttgctaatttgaacattttcgttaatttaacagggctcccgcccgtcagaccttgagcaaaaagggcggcttgcatcccttctgttttcagctcttcatacactgcttttaacatctcatgtgaattaaacaacaccaatatcttcgcttgatgctgcttttccatcaccttaatgtaccgtgctgcttgctctacatagtcgtgctcatcacggttcgtaatcggcggcatatcagctggtacaatcaccttgagctgtttttcaagttcaaacggtgactcaatctgtacaagatgcggataaaaatcctgcagaccaaatcgttctaagcaataatcaaagcgcccattgattgtgagtgttcctgatgtgagaacaacactttttttgttcataaaaaaacgatcagctaaaagctctcctgtatctagcggctgtgcatgcataaagacagcatttttggcaccctttgcatcaatctcaatccaaaccgtttcatcgtttttcggttcaaaaataaaccggtacagcgtactgcaaaatgtatgcataaacgacatcacttgatcgtattcctctgcttcaaaggcaaagtgttctgtcagctgatcacttttttgaagaagctcgcttttttgctgctcatacagcttttcacaagcaattaacaaggaacaaagcttacttgccgtctctttaatccgtttccactgcgcatgcttcgaatgatgacgtactctatgaatgagacgattgatgtctgcttttggttttgtccttttgacaaaagaatgaacggtactaaagaaggcgtcactttccatttgaagctgatgaagatactcatccatttcgataaaggtgtccgtctgtaaacctgcaccgtgaaatctctttttcagcttgtttaaaagaccgccctgtaaggagccaagctgcgttaatttcgcatgaagctggatatacgacgcactatctcctagtgtttcattggctgttttctcaaattgatgagcctcgtcaatcacatatacgtctgcatgctgaaagatagaagatgcttccgtttgtgataagagcaggcgatgattcgttaaaattaaattggctgttttggctctttttttggcgcgttcataaaagcagtattctttaaagcggcgctttttcgatgtaaacggcatgtgcacacacgaaatacggtcttttatattggcagctcctgacggtaaattcagttcagataaatcacccgtttctgtgacaaggagccacattaatatttgcgccttcgttaagaccacatcatagttatcatcttcctcatgcagcacatgctcaaacttatctaagcaaatataatgcgcccgtcctttgaatacacaggcagctggctcaaacggaagcaattgatttaaaatcggcacatcgcgctgaagcatttgctgctgcaaaagaatggaatatgtactaataataacaggttttcctgatttctttgcctctagtgcagctggtatgaggtatgcaagcgtttttccaatacctggtgccgcttcaattaaagcataggccctttcatgaaacacatctctcactttattcatcatcgtgagctggccttctcttacttcatagccttccactgtttggggaagcttctttttgatctcctcaaacagctgttcatcgtcttcccctactgaatctgtcgtatccgtttcaggattggtgacatcttttacagcaaaagagcccacttctaccaaagaatcttcacggctagcacgactcgtttcaagctgctgtattaaaagtcctatatcgcttaagagataagaggataatctgcgcagctgctttagaacatttggcggtgtatgtgttaattgatgtaataaggttaaaaataacatggcagtaacttccgcatcactatccgcccggtgcgggtggtcatgtggaagcatgagctcttcacttaattcagtgagcttataaccttcaagctctggataaagaattctagaaatctcaactgtatcaatcgctagcacatccagctcatttttcccgcatgcttttagttcatcatttaaaaaattcaagtcaaaatgaacattgtgcgcaacaaaataagcgccttgaataagatcatacacctcttgggcaatgtcctcaaaaaacactgcatcgttaaccatgtgctgctgaatacctgtcagctgttcaataaatccagggatcgcttttcccgggttcacatattttgaataccgttcgacaatttgtccattttcaatgaccaccgcagcaatttgaatgattttatcaccctttttgggtgaatttccggtggtttcaatatcaacgacaacaaacctttgatcggccataaaatggacacctcaattcctcgtttcactcgaagtgaaacacgctctgggcaaaatagctgaaacagaacagcttcttttcttaaaactgttctgtttccttgcagcatgcgttataaaatcgttctcgcaggctcttgcccaatcatttgttcaatttgattttgtttatttaatacgaccacttttggtgtatgtgtctttgcttcttcttctgagagcattccataagcgataataatcacttcatcccccggctgaaccaatcttgctgccgcgccatttaaacaaatgacaccgctctttctttcaccaggaataatatatgtttcaagtctcgcgccattgtgattattgacaatctgtactttctcatttgccatcatgcctgccgcatcaagtaaatcttcgtcaatggtgatacttcctacataatgtaagtttgcttctgttaccgtcgctttatgaagtttagaggtcataaaggttctatacatgtttttcaccgctttcaggaacatggaatatcacattatcaatcagtcttgcccgtgagaatttcaccgcaatcgcaatgatgacctgacctgccaactgctgaagcggctcaagctctggataggagtagatctcaatataatcgatttccccgctcgtttgaagaatttcctcttctaccaactgataaatacgactgacgtcacgttcacctttttcaaccgctgactgtccttttttcaatgcgcggtacaaagcaggtgcttcttgtctttctttttcagataagtacacatttcttgaacttttcgctaaaccgttttcttctctaactgtcggcacagatacaaggtgaagatcaaagaagaaatccttgatcatcgcatcgatcacagcgacttgctgtgcatcctttagaccaaagtatacatttgttggtgctacaagatgaaatagctttgtaagcacagtaacaacgccgtcgaaatgtcctggacgttttttcccgcataagacatcagtccgcttttgaaccgtcatcgtgatagatggctcatttggatacatttctttcacatcaggtgtaaataaaatatccacacctgcttcttctgcaaggcgctgatctcttttcatatcccttggataggattcaaagtcctcgttcggtccaaattgcaaaggattgacaaaaatgctcattaccacaatgtcattttgatcccttgcttctttcgcgagcgtcagatgtccttcatgaagaaagcccatcgttgggacaaagccaatggaatgctgtttttctcgatgctgcttgatcaattccttcagctcgtgaatatgggtgacaacgttcattttttcatacccccatataaaccatcaaggacttcttctttgatatgaaatgtatgcttgtcttctggaaatgtgtgtgcttttacttctttcgtatattgaataagcgcttcttctagtacagtatcaatttgcgcgtattgtttcacaaacttaggtgttctagacaccccgtatcctaccacatcatggtaaacgagaacttgtccgtctgcctcagctcctgcaccaatcccgatgacaggaattttcagcatgtcggtaattcgttttgtcagttcaccaggtacgcattcaagcacaagtgcaatcgcaccagcttcctcacattttaagctgtcttcaatcaatttctgcgcactttcgtggtcttttccttgcactttatatccgccaagtactccaactgactgaggggtgaggcctaaatgactgacgacaggaatcccgcctcttgtgagagcttgaatggattcaaatacgccatctccgccttctagctttaaggcatccgctccgctttcttgcatgatgcgtgctgcgtttttcaatgtttctgctaatgaataatggtaagacataaatggcatatccgtcacaataaatgtgtcttttgcgcctcttttcactgcttttgtgtgatgaatcatatcatcgattgtgacttgtactgtcgaatcgagtccaagtacaaccatcccaagtgaatcaccaactaagatcatgtcgacttccgctttttctgcttgctttgcagatggatagtcgtatgctgtcagcatcacaatcggttcgttttgttctttcattttgaaaaaatctagctttgtcttcatttgttcctcctcattctggagaggagatggcttgcctcacatcacatgttttgatttctcatgcgcggcgaatcatccctctgtccaagtcccttaggatcaaggcagaaatttatcaaatttttgtttctataggtacagctctttttcagatactgcccacacgaagtatatcaaaaatgtgccgggtgttccacttaagttgactttatctcgatgtctgcggagtagattttttgaataccttcctccgtttcaagcaataaaacaccttcttcattgattccgagcgcttttccagtgtattgcccattgacggtgcgggcaacaatatgctgaccgatcgtcatcgcatacgattcccataattgtttaatcagtgtaaatccatgcttcatataatcgtcataccttttttcaaaagtggacatgatctgttgtatgagcgcagcacggtccactttttcattcagttccattcgcaggcttgtggcgacatcctttagttcatccggaaagtcatcagccgtttggttcacattaatgcccgggccaattatcaccgcatgaacctggtccgcctctgcttttaattcggttagaatgccaacgacctttttcccgtttaacaaaatatcgtttggccatttaatggatggactgagtcctgtttgctctgcaatggcttctgcgatggctacagatgctaaaagcgtcatctgcggcgctttgtgcagcggaatttcaggccgtagaacgagactcatccagatgcctgtcccatttggtgaatgccacgttctttgaaggcggcctttcccgtttgtctgatgatcactgacaacgagcgtaccgtggggcgcaccttcatttacaagatcatgggcaatcagctgtgtggaggcgacttctttctgaaaataaatgtgcctgccaaagctctctgtttctagaccaaacagaatttcatcctcactaattttgtccggtttacgaagcaggcgatatccctttcttctgacggcttctacctcatagccctcttttctgaggccctctatatgcttccagacagccgttcgagaacagccaagctcatcacatatttgctgacttgagacaaagtcctcacttgatgctgtaaatagttcgattaatcgttttctaattgctgatcgcatgctgtaagccactcctctatggcttcttttcggttttccaaatgattttgcagaacagcttttttcaccaaatcgagctcttctgcgatccattttcctgatgtcttttgccgaaaggccattaaatcttttcctgaaacagcgaggtcttgaagcgttttaatcggaagggcatcataagaacgcttcgctgcctcaagctcgtcaaagaaaatgcggcgctcgtgttttagctgtgagatcttcaagctagataagagcacttgttcaccagcctcaaacatcttctccgcatcccagtcacaatcgacgtattggctaatcgtcaccgcgtctttcaaaagctttgttgacagcttccattcttttaagaagagcacagcctccgcttcatctaagccaagcaaatggataacagccccccatacttcttctagtccatccagtaaataatacggaaatgattgaaaggattcttgcagaccatcctttttgagacccggcaattcttcatacaatttggtagaaatgagcaccttaatcgcccgctcacaataacggccttttaaaagcttctccatttcaatctttttacgttcaactgatatgttggcaagcaggtgcttatcttttttcatcgcttcagccgtttctgcagcgagctcaaagccaagctgacttaaaaaacggaccgctctcatcatacgaagcgcgtcttcctgaaagcggcacgcaggatctcctacggtttgaattcgtttccgctcaatatcctgtttgccccctacatggtcaatgatctccccatttatatccatggccatcgcattgatcgttaaatctcttcttaaaagatcttccttcaatgatgtgataaacgccacttctttcggtctgcgaaaatcttcatattctgattcagttcgaaacgtcgtcacctcatagctgaccccatcatgtaacacgatgacagtgccatgctctttgccaacatcaactgttttttcaaataaggattcgaccttatcaggcgttgcatctgttgctatatcgatatcgccgatttccctgcctaaaaggacatctctcactgctccgccgacaaagtaagcctgatacccatgttcgtgcagtgtatgtaaaatagggatcgcatgtgtgaatggttcattcatgttcatcatcaccttcgatcaattctaggtaaagctcttcatattcactcacaattttttcagaagagaaatgggcctgaacactagactgggccgccgcagacacttgttcatgaagcgctttgtctttgagtatagagactgcgtgtttagctgccgcgtctatatcgccgagcgggacaaggaaacctgtttctccatgtgtaatgacctctggaatcccgccaacatcagtcccaatacatgggacaccgcatgccatcgcctcaagaagcacaagtccgaagctctctttctcagaaagaagcagcttcaaatcactgatggaatacagctcttctactttctcttgctttcctaaaaataacacgcggtctgtcagccccagttttttcacgagttcgcatacgaccgatttttcaggaccatcaccgatgagcagcagctttgcctgcacctgttctgagatctttttaaacacatgaacgacatcatgcacccgtttgacctttcgaaaatttgatacatggatgacgaccttatcgtccggtaaaagaccataatgtgtctttagcacttcgtgatcttcgcgcaaatacacccgttcatcgacaaaattatggatcgtctcgatctttttatttggtttgataaggtcatacgtctgcgcagctaatgaatgcgataccgccgttacccggtctgatgattcgatcgcaaatcgaatgacttcctttagtgatggatcatagcctaataccgtaatatccgtcccatgaagcgtcgtgacgactttcacagagtgtcccgtcatctgcttcgctaagaacgcacagacggcgtgcggaaccgcataatgcgcgtgaataatatcaagcttctctcgttttgcaacttctgccaatttacttgctaatgcaaggtcataaggcggatattgaaaaacagcatattgattgacatccacctcatgaaaataaatattcggatacactttattgagcctaaacggaatacttgaggtaatgaaatgaacatcgtgccctttttcagctaaacgttttccaagttccgtagcaataatgcccgagccgccgacacttggataacaagtgattccgaccttcagttttttcataattaccccccaagtaagtcgtcatctatcaaaagtggtttctttgtgataaacccttctgcataagctttattgacttcccttccatacatagactctctcattttgacaaaatcaatataaccgttcacaagaggtgtctcaactgaattcgccgatttaacaaattggcttttatacgcatgcaagctatcaatcttttggtgcatttcctcagaaatatcaatcacaaaatctgggcgatgatgaccgttaatcatgtaataatacatctgacttattttatgagctggctgcttgtatgaatcttcaaatttatgtatacctgccgaaaaagcagcctcttctacaagtgagcccgcatgaccatgatctggatgccgatcttggtgatgcggagcaaaaatcagttttggcttgtatgttcgaatcacgcctgcaatgtccttcatcgcttcgtcatttagataaagtcctctgtctggcagtgtgagctggattcgcgttgacacacctaaaatggcggcagcagcttttgcttcctctttacggctctctaccgttccattcgaagataattcggcctgggtcaagtcgcaaatcccgacacgcgcccctttttttacgtattttgcaatcgttccgcccataccgatctcaacatcatcgctgtgggcaccgaatgcaaggatatcaagtcgtttcatttgttcctccgttttttactacatctcgaaaatcaaacgtgcctttatttaaattcctgactaaaatttcagcggtccccatattggtggctagtggaatggtatacacatcacaaagccgaatgagtgcagatacatccggttcatgcggctgcgcggtaagcgggtctctaaaaaagagcacaagatccattgcattatcagcaattaaagcaccaatctgctgatctcctccaagtggtcctgactggaaacgatgaatgggaagccccgtcgcttctttcactctcaaacctgttgtccctgttgcgtaaagtgtatgatctgccaatatatcacggtacgcaatggcaaattggatcatgtcactttttttcttatcatgagcgattaaagcaatgttcatcaggaatccactccttattagtcgatgatattttctaaaccatagacgagctgatcaatgtgcatgacctgttcaactgaaagcttcacacctgacataaatgatgcacggttataagaatcatggcgaatggtgagcgtctgtccgtccattccaaacagtacttcttgatgtgcaatcatacccggaagtcttacgctgtgcagacggataccgtcataatctgcgcctcgtgcaccttcgattaattctttctcttctggatgtccctgctttttgctttctctgacttctgcaatcatttcagctgttttaagcccagtaccgctcggagcatctagttttttatcatggtgaagctcaatgatttcaacgtcaggaaagtaattcgctgccattttggcaaacttcatcattaagaccgcaccgacagcaaagtttggcgcaataatacagcctatgctcttttcttctgttaattgctgtagctctttcaggtcagcttcagaaaatccagtggttcctacgactggacggacgccatgttcaagtgccttttttgtatgtactttcccgatttctggtgtcgtcaaatcaattaatacatcaggtgctgtctctgaaagacacacatcaatatctgtataaattggcgcctcagatgtcgtatgaatcacatcagataatttttttccttcgtgcgcgtgatcaagggctgccacaagctcaaaatggctcgtttcttctgccagcttcacagcctctatccccattcttcctcttgctccagcgattactactttgatggtttggttcgtcatcgtctctacttcccttcttttttcgtccagcggtctttgtctcttgtattgaatttatgcatcacacgatcgtgtgcttcctctagtgatatatctagtgaattagcgaggcatgttaacacaaacaaaacatcgccaatttcttcttccatgcttttttctgtttccgttgtttttttcggcttttctccatagtaatggttaacctctcttgctagctcgcctaattcttctgtcagacgggccatcatggcaagcgggctgaaatagccttctttaaattgtcctatgtaatcatctacttcttgctgcacgtgacgcagcgttttttcattcgtcatgaagctcatcctcctatccatctcttacatgttagcgaaatcataaatatttgacaaatgtttaagactcagtttgcttgtttctctcccataccatataatattatcgctgtctaagcaaaaaaaggagtggtctcttgctaaaagaaattcgtcttaaaaatatcgtatttattttaataggatctgcgattttttctttcggtcttgttcattttaatatgcagaacaatttggcggaaggcggatttacaggtattacactgcttttatattttctattccacattgatccatccatttcaaaccttgtcttaaacattccgatcttttttatcggctggaaaatgctcggcagaaccatgtttacttatacaattgtaggaaccgtcagtctttctgtctttcttgccatcttccagcgctttcaaatacatatgcctctccagcacgatttggcgctagccgcgctctttgctggtgtgtttatcggaacaggcctcgggatcatctttaagttcggcggtacaaccggcggcgtggacatcatcgcaagactcatcaacaagcattatcaggtggccatgggacgaacaatgttcatcttcgacgcatgtgtcattacgatttctcttacttatttaaattacaaagaagccatgtatacactcgtcgcagtgtttgttgccgcaaaggtcattgacttcatgcaagaaggcgcttacgcagccaaaggcgccatgattatctctgaaaaagatgacatcattcaaaagaaaatcacagaggaaatggagcgcggtgtgaccattttaaaaggggttggttcctatacaaaacaggagcgcaacgtcctttattgcgtcgtcccgaaaaacgagcttgtccatctcaaaagcgtcgtgacctcagtcgatcctcatgcatttgtatctgtcagtgacgtgcatgatgtgcttggtgaaggcttcacattagatgaacacaaaaagccgcttaatccgcattaaaaaaagaagcccaaaaatggtgcttctttttttatgatttcggataatcagcctgacgcttttgcttcttctctttttcagcacggtatttccgaaacccaacatacgttaacgttaataaaatgatactccctgttgttaaaatgacccataaaagcgatggatcagcttcatcttgatcgacgtgagcaaacacactcgataaatcctcttcgagcttcgtgagacgctcaagctttgtcccacttgatgcttttaaaaattcaccttgctcaatcacttccatatgctgcttaatcgtttgcagcttttcaggcgaaatatcaatggttaaactagggtatatcatatcgtataaagaaaccagctcattccaagtttcataaaacgtcgtcgactccggatccttcacttcttttttcaaagtaggaaaagaccccataatgggcttctccagcgaaccccaaagaggctcagagtctgactggatcgcatcaagcagcattctaaactgagaggcataacgaagcttttcgcgctcattcaattcttcctgcggaagcccttttataatatcttgatagccaagtgtaatttgccgaatctgcgtatttgtcagagtaccacgccaattctcagctttaaatgtcttttcaacatacaatgcgacctgtaacgcctcatcatatttagcttgtctcgttaattgaaagattgaatctgatagttccgttaattcttgcagcacgttagcggctgtttcctcgcctttggcaacagatggctgtaatacgagaaaaaataatagaatcatcgcgattggctttcgtttcatgcaagtccctcctagcccttctccatacagcgtatgaagaaaaggacaaggttagaccaatattgttaagggagttcaagcttgaccgattttttcgataggacgagataatacgaaacaagaagaacggcaatacttaaccaaaacgtgacatagccgatctcgtttgaataggcagacagcatagaataacgcggcatcataccaaatacataatcaatcacatcgttatgtaaaatccatatgccggctaccaccaaatgacgcattttaaaacgataatacggtgcaaacaatacagcttgaaccgccatcgcaaagtgagacccaatcagcatgtatccttcccacggaaagtcatcaacagataaaagcacaaagatattcattcctacagcccataacccgtacttaatcaaggtcacaagggcaagtgcttcaaaataaggagcgtttcgtttcatcaaaaacgcaagtagtacaaataaaaagaaaaagcttgccgttgggctgtctggaacaaaagctaaaaagatagccggcgtctctacaagctgaggaatataccaatagtagccgtacacagtgccaaggaaattgatcatcaggactagcacaagcatgtagcgcgtggctagcagatattgaatccatctcatacgtctcttcactcacgatctgttaaaatcagaaaaaagctgacagcgccagctttttctcttttgagtatatccttgtacttgcatttaaacaactgaattatttagatttgacttcagataaatatttagaaagcttttcaagttcttcatcgctacctttaaagatacccttaggcatgttgccttttccttcaacagcgattttagctatctcctcaggtgcaagaccgttgtcaacaagtgacggtccggctgctccgccctgcatgttatccccgtgacaggagatacatgtctgctcctgataaattttatactcttccgctgaggtatcaatctctgcttctttcttaatttcaccttgcttcgccgctgcttcccaatcatgagtagcaacagactcccacgttaaatatgttgctgcgccgactgcaaggatcatcatccccactgcaaccggtcttctatacggtctgcgttcaggaccagaatcaagaaatggtgcgagcaaaagtgcaccaaacgcaattccaggcataatcatcgcgccaactactgtatagcctcctgcagcaaattcatattttaataactggtacaagaataggaaataccagtctggcagcggaatatagccggtatctgttggatcagccatccgctcaagcggaggtgcatgaacaacagttaggacaagaaatccaattaaaaaaacggcacctacaagccattcctttaaaagaaagttcggccaaaaggcttctgtttttcccggatattcggaatagtctttaggtatgttaggttttctttctgccggaattctggagtctccgacaaacttcatcccttttcccctatgcaaagtcatcccctcctcattgaacattcatcaaacgcaactttttttatagcggtccagaaattccttgcttacgaatcataataaagtgggcagccatcagcccaaataatgccgctggcaagaaaaagacatggatagcgaaaaatctcgtcagcgtttgtgcccctacaatgtcaggatgacctgcaagcagcgttttgatctcttttccaatgaatggtgtggcttctgcaatttgaagaccaaccttcgtcgcaaatagcgccttcatatcccatggcaagagatatcctgtaaaaccaagtccaagcatcacaaagaaaatgagcacaccaacaatccagttcagctctctaggctttttatacgccccttggaaaaagacccttagcgtatgtaaaaacatcatgacaatgactagactcgcaccccagtggtgcatccctctgacaatctgaccaaatgccacttcattttgcaaataatagacagattcccaggcatttttaatatccggcacataatacatcgttaaaaacatgcccgaaaggacttgaatgactgtcacaaaaaacgttaaaccgccaaaacagtacacaaaagcggagaaatgatgtgctggattgacatgctctggcacctcatgatccgcaatatctctccatattggtgtaatgtctagccgctcatctacccaatcataaatcttgttaagcatcgttacccttcccctttcggcacagcttttccaagatagaggtatccgtccttcacttgctgcttataatggtcaagcggtgcaagcggtggagttccgggtacgtttgtaccatccttgtcgtacagcccatagtggcatgggcagaaaaatttgtttggatttttcggatcactgttccagttcactgtacatcctaaatgtttacagattggcgataaagcgacaatttcatccccttctttgtacacccatgctgacctagattcctttgactcataccatgcatctacttgatcaattttaaagtcaaagcgcttcggttccttcgtcagttcatctacactgacaacttgaaccatatcctgatcctctgttccttttagcacagggtcaagcgcaaagcgaaccataggcatgagcattccagcggccataaatccccccacgccggtcaacgtgtaattcaaaaattgacgcctggacactccatgtctcttctcgctcatttttttctccccccctcaggtcgtcagctactttataactgaattagaaaaaatttcataaaactaggacaccctcataatatatcaatctattcacaaggtcaacagcctaaaaagctatgtacaatgcaaatgtaagggtttttatgaagggttccacttttgtaacaaaaagttcaaaatttgttctacactgtcttgaacgattttttgctttaattctacctttaaatgctcgagcggaaccggctttaacaaaaatagcgcttcactaaccgccgcatgctctttccattgatgatcagatgagatcaacacgacatgctgaaaatgatcttctagcgactgcttcatcgtaaagatgtcttctagttttcgatcattgatctctacatatgtatgtggtggaaaaagaaagacccgccctttcagctgcctttcaagttcctctgctacaagaatggtaaactcacctaaagatacagtttgtttgatttgattcgcatctattccaactattggaatgatagcggtatcaatgtaatctttagattgcaaaaagcgatccgcatcctccgcttgaaacttcatcaatttcccctctttcatgacataagccctgcctgtatagggcaaggcttattcgttcagtttatgacaataggcttaattcttttgctaacttattaaatgtttcttgatcatgacggtcaagtgcctcatctatctctttcataagccgttctttttggaacgttgcgatcgagtgttcaagcactttctccgcaagatccttatctttttcgttctcataaagatcctttggaatatgaggatttgtttcaagcacagctgcatattccggcgaacgataagcagaacggaaattcaattgaataaacaaatcttgctgtttattcaaacgaatatcatgaaatgacttttcagcatctgtcgtcatgatgttttctttataaaatctaaagggaacttcatccacacagtgtgttgacataatgattccccttgggcaaaattctgcttgctctacaaaatgaaccttttccatcaaagagtcgtgactcattaaataatttaatatccaaacacactctcttcgttttagctgataatggtttaaaaaccaccggatgaattccttcttttcattgacagaaacaggggtctgcatgttattccctcctctatcgtaaattaaattgctatacatgaattattcaacaaaccagttcttcattcctgcaaactataaggaaatttcgtcttcaattcttaaaatcgtttcttcgatttcttcattcgtgccatctttctgaagaactttgcgtaatagcggcaatgcttctttttgtctgccttcttctaaaaggaacgaagcgtattcatataaaaagtcacgctcctcatcaaaatcaggcagagccagcttgaagtaatcggctgcttctttgtattcctctcgtccaacagaagcagatgcagcataccaattccattttggatcatcttccccaaagcttttaacctctttaatgacatccaggatttcatcaaaaagctcttcatttaaatagatcgcgagcaatgtttgaaccgcttcaatatatcccggatcaagagcaagtgcttcttgaagcagctttttcgcatcttctgaatccccatttttcaagtcaatctttgcaccatataaatataattctttgttatactcatcaattttaataccctcttttactacctctaaagcctcctgatatagtccttcttcctcataacttttcgctaaaggcatataaagagacgaataagacggatcaatatcttttagttctgaaagctgctgaatggctgttttcgttctgccggccctcatcgctgtaaatccgtagccaaaaagtgtattcgggtctgtttgatcttttactgccttttcgtaccattcaagcgcatcttcaaattctccagcggtgctgagtgattcagcgagtctctggtaaacattgacgccgccaacctcatgttgttgatctgcgactttgtagaaatagtcggcggctttctttgaaagaccttgtgaaaaatacaattcacctaacgcaaaatcaatgatggcttcatttggaagcagttctttcgcttttaagagcttttgttcactgacttcaaatagtccttgcatttgatacaaatctgccattaacaataaactctctggatacgcatcatcatcttcaggaatcgtctctaataccgaaatcgccttttcttcttcatcagagtcaatcagtagctctgcataaaaacatgttaaccctgtttcctctggatataaatcatgtaaatcactgatgagattccgcgctttatcgatatctccccaatcataatataactgagctgcctgcgccttttcttcatcatgcaaatgattttctgcctgagcaagtgtttggagtcctttttcagtctcacccgcctcaactaattttatggcttcttgtaatgaactattcaaatcaaaccgttcctttctgtttccaaaaacctaaactattgttacttcatatcataatcgacaggtactcatccagcaaatatgttgctcttttaaaatgaacccatttttttgttttaaagactgtttttcatttcatcctttacgaaacggaagttttgtaaactgcaagcacctgaaattcatttttttatcggataaaatgatttttttccaggtttcatcttgagacaagctatgctatatttcttacaaatatgcataaggaaagaaaaagcctgaggacatcctcagactgttttggttaagtattcaatgtgttcaaagaaattcgggtatgatacacgaacagcatctgtatcttcaatctcaacagcttgctttgtgatgcaagcagcaacccccagcatcataccgattcggtgatctccgtagcttgacacgatagcgccgcctttaagtgtggttttaccatgaatcttcataccatcatcagttgcttcaatttcagcaccgagttttttaagttctgacacgacggtatcaattcgattggtctcttttacttttaactcagcagcatctttaataatcgttgttccttctgcttgtgtcgctagaagcgctataatcgggatttcgtcgatgagtcttgaaatcatgtcaccagaaatttcaattccttttaatgaagaggttgaaatcgttaaatcaccatacggttctccgtcttttgcatctacttctttgatctcaagattcgcacccatttgtttcagtacatcgataatacccgttcttgttttgtttagcccgacattttttaacacaatccggctgttaggaacaatagatccagcaacaaggaaaaatgcagctgaagagatgtctccaggaacaaatatatctgttgcttttaatgtttgaccgccttcaatggaaacactttgttcatcttcgtctagttttacaccaaacatagagagcattctttctgtatgatctcttgatttatgcggttcagttaatgttgttgttccctctgcttgaagccccgctaaaaggacagcggacttaatttgggcacttgccaccggagactcatatgagataccttttaaatgaccgccacgaatagacagtggcgtatactcgccgtttgctctgccatctattttcgctcccagttgtttaagtggacctgttactcgttgcattggtcttttagcaatactctcatcaccgatcagtgtactgtgaaactcacaaccagctaatattcccatcattaatcgaatggttgtaccagaattcccaacatcgaggacgtcagacggctccttgagctctttcagtcccttaccgtggatcacaacatctgtccctttttgttcaatttcaacgcccatctttctaaagcaatcaatcgtacttaaacaatcggctccaggaagaaagtttttcaccactgtagtcccatcagcaattgcaccaaacatcactgatctatgagaaatggatttatcacctggaatatgaatgactccattcataggagcatttttatgaattttcatgtttgtcacctcagtcagcataaaatgtatcgtaattcgctctattttttatacagatctctgcacgcttacggtcgtcatctgtttgaaaactaatgcgcaaaatcccattaatgtcttctcgcgtttcaataatacggatattcgtaatactgatgttttcatttgctaaatgccctgtaatctccgaaatgaccccagggtgatctggaacatccacataaaggtcataaaaagcaggaatggcaccttttttcctaagaggaagtccatcgcgatattcctttgcctcttgaaaataagagaacaagccttcagcgtcttcttgctgtacaaaggtctcaatgcggtcgatctcttttttccattcatgaaaccggtctaaaatcttgtttttgttgtgcagaaggatatctcgccacattgcaggattgcttgaagcaatacgtgtaatgtcacgaaagcctccagcagcaaaccgtttgacaagtgggaattgttcttcaaaatgatgtgcttgatgcacaaggctggctgcaacaatatgagggaaatgactaatcacacttgttacaccatcatgttcttctggagtcatctcaatgaaatgagcatttgtcccctttaacaagtccttcaaacgatcaacagcctggcgatttgtttcctttgccggcgttaaaatgtagaatgcattttcaaataaaaagtctttcgctgcaatgactcctgacttatgagagcctgccatcggatgtccaccaataaattggtagtgcttaggaagcgttttttcagcaaaatggacgaccttttgctttgtgctgccaacatcggtaattgtgagctctctctcaattccagagtttgcaatctcacgaagcatcttgactgtttgctgaactggtgttgccaatataatagtcgcagattcatccaaacctgccgcaaatgaatcagctgctaaatcaatgatacccaactttgttgccgcaaccatttgttctttggacacatcgtatcctacaatttttttatggggatactcttttttaatcgacagtgcgatggaacctccaattaagccaagtccagcgattaatattgtttcgtttgcatcattcatgttcatcacctgttttttcacgaaaattaaaaaagccatttcaacagcttatatgtatatgaggttggtacaatgaaagccatatcctgccttaggatatgactttatggttatgctacgcacgaatgccttgcattaaatcggcaagtgtacttagaatttctgcattttgctccattgttccgaccgtaatacgtaaagaagtcggaaaaccaagtgctttaccagaacgaacaatgtagccttttttcaataatgcattgaataattcatctgcatctctcttaaaatcaatcagcacgaagtttgtttgagacggataaataaaaagtccaaaacggtcagcaaattcttgatattgcttgagacctgcttcatttttctgtctgcaagattgaatgaaatcctgatcttttatcgctgcacgtgcagctgcctgagcgatacgactcgtattaaacggctctctcgctggttcaatcgcagtaatcaactcttccgacgcaatgccatagcctactcgaagtgcagccagtccatacgcttttgaaaacgttcggagtacgatgacattttgataggagtgtaataaagataagctgttcggaaagtcttccgcacgaacgtattcgacatatgcttcatctagtacaacaagcacatgagctggtacttggtctaaaaacgccacaagctcagattctgacaaatgatttcccgtcgggttattcgggttgcatacccagacgaccttcgtgttctcatcaatcgcatccagcatgcccttcagatcgtgagctcctccgtctaaaagcggcacctctcgaatctctgcctgctcaatgacggcattgtgacggtattgcggaaaagatggagcggggatgacggtatttgtatgttggtcaaggaatgccctagcaataatttgcacaagttcatctgagccattcccgaatattaattgtttttcatttacttgaagaaactcagcaagctccgttcttaaacttgcgctgtatccatctggatagatcgctaaatgttcgagctcagcttgtatcgcctctcttgcatgtaaggaacatccaaaagggttttcatttgaagccaatttcacaatcttgtctaattgatattcttttttgacctcttcaattggtttcccaggttgatacggttttagttgttttaattgatctttgatttgcaaaagtttcacctcatttgaatgaatagaggggactaaatgtttttgcataggtttcaaattctcttaaagcttcttgacgtgtatcacttgctaacaattgatcttgaagttcttcaatttttttcacaagtgcactgcctacaacgacaccgtcactcagtttattcattgagtctacctgctctcttgttgagatgccaaaaccgaccgcaaccggtatgtgactcagctgtttcacttgttgaataaaatcagtaatcgattcgtcaaaggtttgtctgacacctgttacaccaagagatgaaacacaatacacaaaaccttctgcctgctctacaatgtttactaatcgttccttgctggttggtgcaacgagcgaaatatatgaaatgtcataagtttgacagttcttttgcagctcactgctctcttcaaacggcaagtcgggtgttaagagtcccgaaatatgatttttgcgcagtaaagcgaaaaagtattctgtgtctaattgtaacacaggattataatacgtaaatagaattacaggaatttttacaccattttttttcatcttccctgctaattctatcgcttttacgatattcatgccatgatttagagctctttttgaggctctttgaatgacaggaccgtccgctagcgggtcggaataagggacacctagttcaatcgcatgtgcaccggctgcttgaagggacacagctaaatcaatcgtgacttcttctgacggatctcctgccgtgataaatgggatgaataatttctcgcctttctctaattgaaatgtgatcatttggttttgccctcactttcaaacacattcattaatgtatgcacatccttatctcctcttcctgacaggcagacaaggacgatttcatcttcattcatcgtcctgctcatctcaaacgccttggctaaagcgtgtgctgattcaatcgctggcaggattccttccttttctgtcagcagctttagcgcatccagtgcttcttgatctgtagcactcacatattgaacccggccgctcgcatgtaaatatgcgtgctctggcccgatcccaggataatctaaaccagctgaaatggaatagggctcaataatctggccaaattcgtcttggattaaatatgtcaaagatccatgaatgaccccttttgtccccttcgtaatggttgctgcatgaagcggcgtatcgattccttttccagcggcttctacaccaataatatcaatctcttcatctaaaaacgctcggtacattccaatggcattacttccgccgccgacacaagcaatgactttatgtgggagcctgccttcttttttaattatctgctcttttgcttcatcaccaatcatccgctggaactcactgacgatttggggatacgggtgaggtcctacaactgagccgatcatatagaaatgatcactgcagtgctggacccagtaacgaatcgcttcgttggttgcatcttttaatgtgccgttcccgcttgtgacaggtatgacctcagcgccaaggagcttcattcggaatacattgagtgattgtctttccacatcctctttccccataaataccgtgcaggataatccaaactttgcggccaccgttgcagctgctactccgtgctgtcctgcgcctgtttccgcgatgatgtttgatttccccatttttttcgcaagcagagcctgcccaagtgcattgttaattttatgagcgcctgtatggtttaaatcttctctttttaaatagatttttgcgccgccgaggtatgctgataattgatcagcatatgtcagcgcagtcggtctgcctgaatagttttgcaaaagggaaagatattcttgctcaaaagcagggtcttcttttaattctttaaatgcttgttcgatttctttgagtggctgcataagcgtctcaggaacaaatttccctccgaattctccatatctgccaatctcatttggatatgcgtacatcgtttaacatcctttcttcgagcgctttgatcttagcgctgcttttcttcccgttttcttctatgccgcttgaaagatcgatcgcttttgggccataggcaagcagctctggcagcgtttctggtgttattccgcctgcaatgatgcatgttttctccagtcgttttgccttttgaatgtatacaggtaccgcttgccatgtaaaagctgtgccagaaccacctctcatcccttttactttcgcatcaatgaggaagccatcgacaaacggcgcaaatgccgtcattttatcgagtgtttcttttacatcgggctcgtggtgaaagactttccacacaatcgctcctgtttgttgttttatttcttttgcatcctctcgtgtttcatctccatgcagctgcacgatatctaaaggaatatgctttgtgatgtcacacactttttggattttttcatttacaaatacaccagtaatctctttctcgcactgcgactcggtgagccattgtttcacttgttctggatcgacttgtcttttacttggagcaaaaataaacccgatcgcatctgcttgagattgcgcaatgcattctacatcttctagtgagaccgctccgcaatattttaaaaaaggcttcatcgtgatcattcaccaaacaacgtctggacggctttttcttgtgagggttctctcattaatgattcacctacaaggacagcactcgctccatgttttttaacaaaggtcagatcatcaaatgtctgaataccgctttcacttactagtaagacatcctttggaacaagtggtgcaatctcttttgtttgctcaactgttgttttaaatgtttttaaatttcggttattcacgccaatgatttcaggggtgaataggtttaagatttgttccagtgtatctgctgcatgaacttcgacaagaatatctagtcctttttccttcgcttcaacatagagttcatgcagctgtttcggttcaagcacttctccaattaataaaatggcatctgcaccgatacgtcttgactcttctacctgtatggaatcgatgataaagtcttttcttaaaattggacgtccgacgtgttctttaattaaggaaagatactcgttcttcccttgaaaaaatggttcatctgttaagactgataagcaatcagcattcgatttttcgtatgcttttgctgtttgcagaggatcaaaattcggctgaatgattcctttggaaggagatgcctttttcacctcagcaatgagcccaatcgaacggtgaggattcatcagtgcttctttaaatgatcgtctttcatagtttccatcatcaggtaactccaacgtttggatatgttcttttttgcgtgcaatgatttgattaagcatagatctcttcctctttcgttttttgtcttaaacgagccaattgttctttggctgctccgttttttatcgtttctaatgcttttaatgttcctgccatgaggctttcagacttgcctgcgatatataaagccgctccggcattcagagctgtaatatgaagcggcgccccttctgtttgatgattcaatatattctgaatcaattttgcgctctcttccggtgattggacctgaatatctgataagtatcctttttccagtccaaagtcttctgggtttagcgtatattctgtcatggcaccttttttgagttcaatcacatatgaatttgctgtaatcgttaattcatccagcccgtcttccccgcatacaaacaagacatgctctggctctaatggggcaagggcttccgccattaatttcgccttttcctttgcatacacaccgatgatttgctttttggcttgcatcgggtggcaaagcggtcctaatagattaaataccgtccggaagccaagctgcttgcggactgctgctacttgtttcatagatgaatggtacagtggtgcaaataaaaagcccatgtttttgtcttgtatttgtcttctcgtttcttctggagtggattgaatgtgaatgccaagacactctagcacgtcggcacttccgcttttagaagagactgaacgatttccgtgttttgcgattttagcaccagcggcggaagccacaatggcagctgcagttgatatattaaatgtagagagtccatcgcctcctgtaccgcatgtgtcaacgacatcgagcgatctttccgctggtgctgccttttgccgcatggccctcacgaagcctgtcatttcttcagcggtttctcctctgtgcgctaaaatcgatagacttgcagcgacttcagcatctgttaaagatccgctcatcatatcatgcattagcctatgggcttcattttctgataggaagcctccgttaacaagagctgaaagtcgctgattcatcctgcacactctccttttctgagaaaatatgttcagcaagctgaatggccttcagaagcgctcctgccttgttacaagtctcttcccattcattttctggaacagaatctgcgacaatgccagcgcctgcttgtatggaagcggtctgatctttgatgctcatggtgcgaatggtaatacaagagtcgatattgccgtcgaacccaatataggcaatacagccgccatacgtttcccttggctcaggctccatttcatttaataattgcatcgctcttattttcggtgcccctgttaatgtgcctgcaggaaaagcggacatgagcgcatcgactgggtgtgtatcctgctttagcttccctgtcacaatggagatgatgtgcatgacatgtgaaaagttcacaacttttgtaaaggtcggtacagacacactgccgtattctgctacgcggccgacatcatttctggctagatctactaacatgtaatgttctgctttttctttctcatcctctaacagctctcttgcaagcgcagcgtcctcttcttttgtttttcctcgttttcttgtgcctgcaatggggtgaatttctaagtgcccatttttggcatggattaatcgttctggcgagcttccgactaaatcgcggtcttttaatttcataaaatacatgtatggagatggattcacaatgcgaagcacgcggtataattcaaatgaactcactgacactgggatatcaaagcgctgtgagaggacgccttgaaaaatatcacctgctcgaatgtattctttgattttttctacgtcctttaaaaattgcgctttttcataggttgacgtcacatgttcaaaggacggtgattcgttcatattccctgataaaatcagttctttcatatcaatctttgtatggagcttgtgaatcatctgttcaagccgcttttgattttctttataagcttgtattttttcgtcttctgtttcatttccggtcagctgggtgtattggataaaatgaacatgattcgtttcatgatcaaaggcaatcatcgtttggcagacaaatagagtacaattgtctgtcgttgatgcgcttaggtgtggcctgacagaagattcaatacttggaataagatcgtaacttaagtacccaactgccccgcctgtaaatgggatgtcaacatctggtgtcttgatttggtattgctctttcatccagtctagtaagtctttcagttcttgctttttcatgacttcctgccctgcagcgtcacgtgcaatatattggttttggtcatcgtgtaaggttaaaaaaggatgtaatccgatgaaggaatatctcgaccagctagaagactcgtctctgctttctagcagatacacaatatcttgcttgagtttttcgacaatttgaatcggtgagagcgtatcaactgtaatggtttcaacaatcgggattgttttgtgggactcgctgtcccttaaaaattgggtcaggtttgattgggaattcataagcacactccttaaatgggattaaggagaatgaggggacatatagagggtttgtatgagtatacgaaataagcctaaaagagggttgctcttttaggcagtatgatgaaatagacgtatcgtatctctgctcaactctactcatctcaactaccctagtctcattctcatcttctctaagcttgcaatgccgtttacacctgtgtgtaaacttcggctgttcatatcgtattataattccttgttttttgtcaactgtaaatcagggcgaagcgtcacagcttcttccaagtacacatgctgcacatcttcctgctttgtgtctgtttggaccgtcattaaaacgcgaatgcaatgctttagaccgccttgaatgtccagctcctgcatacaagtaacaggcacatacgtccatccttcaaactgacgaagggcttttgccggaaaaacggagtgaatatcttgtgtagctgaaattaagatctgcacgacacgttctggatctacttgatttcttgaaataatcgcttctagcagctgtttcgttttgtttaacacttctgtttctgtatcttctgtcacagttgtagccccacgtatcccgcgaaacatcatagacatccctcctcccgtttccattcttcgagccagtgatgcagctcatcttttgtgaaagactgcaagacagcgtctccaacctgttttaataaaacaaattgaacggttccgcctcttgcctttttatcaccaatcattcggtcaacaaatgttttcgtggaaatgttttgagtgacttgtaccgggaatccgagttctttcatccaattttttagttccatccgattgaggctgagtcccagcttcttttcgctcacatatagcgcaaactgcatgccgattgcaatagcatctccgtgcgtgataacgccgtatccatactctgcttcaatggcgtgcccaagtgtatgacctaaattcaaaaatgcacgcacgccttgttctctttcgtctttttgaacaatcgacgctttgacttgaatcccttgatacagcatatgtgccagctcgctctttgaacattccgccaaagaacgaatggacatcagttctgataaaaagtcttcacttgaaatgagggcatgtttgatgacctcagcaaagcctgacctcatttcaatttgagatagtgtctcaagcatactcgtatcatagatcacagctttcggctgatgaaatgcaccgattaaatttttaccgagcgggtggttaatccctgttttcccgccaactgcactgtcatgtgccagcagcgtcgtcggcacttgaataaaatcaatgcctctcatataactagcagcaacaaagccagccaaatccccaattacgcctcctcccagcgcaatgatgcacgaggagcgatccagctgaaactgaatggccttcgtatgaatatgctcaaactcagcaaaagatttcgactgctctccgcttggcacaaccactttatgcacagaccacttctgcttaagtaatcgaaccatttcatcaccgtaaatggcatcaacagctgtatctgtaacgattaggagcttcgtataggaatgccccgtggaagtcatcaagtcgacgatattgcgtttaatcccatcaccgatgtatacaggataagtggctgaagacgtcttaacttccagtgttttcattaaaattccctctgaagctggcgcattttttcaacattttctttaatgcggtcgatttgatcaagaccaaactgctcaacaacagcattggcaatttcccaagccacgactgcttctgcgacaacacttgcggcaggaacagcacagctgtcagaacgttcaatacttgcggagaaaggttcttttgtttcaatgtcaacgctttgaagcggtttataaagcgttgggattggtttcatgacccctcttacgacaattggcataccagttgacattccgccttcaagaccgcctaagcgatttgtttttctcgtatagcctttttcttcatcccagatgatttcatcatggacctcactaccatttttagaagccgcctcgaagccgataccaaattcaacccctttaaaagcgttgatactcagaacagcacctgcaagcttgctgtctaatttgcggtcatagtgaacatagcttccgactccaaccggcattccttcaacgataacttcaacaattccgccaattgaatcaccgtttttcttcgcttcatcaatggcatccatcattttttgacctgcttcactgtcgtagcagcgaacaggcgactcttccgttaccttttgcaaatcttcaatcgatttatatgtcgtatgagctgctttcactccgccaatttcaagaacgtggccagctaccttgattcctagatgagccaagatttgtttggcgactgcgcctgctgctacgcgaacggttgtctcgcgggctgatgaacgctctaatacgtttcgcatatcacgatgtccatatttaatcgcaccatttaaatccgcatgtcctggtctagggcgtgaaatttgacgcttcatttcactctcttcttcttctgtgatcggctctgcccccatcacctttgtccaatgcttccagtcgttgttttcaacgacaagtgcaataggagaacctaatgttttcccgtggcgaacaccacttaacactttcgcttggtctttttcaatctgcattcttcgcccgcggccgtgacctttttgtcttctagccaattcataattgatgtcatcctgctctatgtaaagtcccgctggaacgccttcaataattgtggtcaattgtggaccatgtgattcacctgctgttaagtatctcatgacttgatctcccttcatcgcattaacgcttttaagtaaaactatgataacacacttactactaaaaagtcagctacaaccccttcttttgataaaagaaagtatcagcagatgtcagtccaaacttttctgggtgaaaaatttgttcagtagaacccacaaataatacgccatttggttttaaactgctgctcattttcaagtaaatctcttcttttgcctcttctgtaaagtaaatgaggacatttcggcacacgataagatcaagctgtttttcataaggatctgctaaaaggttgtgcttcttaaattgaatgtgctttcgcacatcatccttcacagtgtaaaatgaagaatcttcttttgtgaaatatttttgcttgatttgatctggtacctcttgcaatgatcgttcatgatatcttcctttttgagctgattgcagaactttatcatcaatatcagttgcaataatttggaagtccttcacgagcggatggcttgatagaagcattgagagtgtatacggctcctctcctgtcgaacatgctgcactccatatttttagggtgccgctgtttttcgaaagcagcggaagaattttttggtcaagcacttcccagcgctgatagtttcggtaaaattctgacacattgatcgtcattcgatccatcgtctcatctaatagtgctctatccttttcaagggcagccgcgaatgcttcaaaatctctatatccttttttatcataaagtgacgttaatcttcgtttcatttgtgcttctttatataaattcagatccaccccggttagttttttccattttccgacaaatacttgatattgatccatcaaagtcctctcctgtctcatctatctttgtcctagtatagctgtttttatcgaaaatttgtatcttctcatgcgaaatttcgtgtagaaatattcatataaaaaaagccaaggtgctcatttgatgaacaccttggcttgaaccttaataaatccagcttgagatggtttgatcccagcttgtgagttcttcttgtttgaagaataagttgatttctctttcagcactttctggtgagtctgagccatggataatgttttttccaaccgtcaatccatagtctcctcttattgtgcctggaagtgcttccttcgggtttgttttgccgataatctgtcttgttacatctactacctgttcaccttgccataccattgcaaatactggtcctgacgtaataaagtcaaccaattccccgaaaaatggtttttctttatgctctccgtaatgtgtttctgctacttcttttggaatactcattagttttgcaccaacaagctgaagcccctttttttcgaatcttgacacaatttcaccgattaattgtctttccacaccatcaggtttgaccataagaaatgttttgtccatatacgttctccaccccgtcgttatgtatgtataggcttacattgttacaaagtgatcgtatcatttttttttataataatcaatttttgacaaaaaatttcacaaaaaaaccaatcaacaacatgttgattagaattttcgttttccaatatatttggcaatggaggcgagtgacgttttcgctcgtcctcgaggaagtttgtccagctgttcaaatgccttcttcaaatacatttcactcactcgaatcgagcggtcgatcgcatctgtttgtttgagatgttcaatcacaggcttcagctgcatttccgttgtttcactattaatcagctttaattggccttcgagtgcctggttcttcagtgcatataagaccgggagtgtgacatttccttgtaaaaggtctcccccaacaggcttaccaagctcttcttcagttgatgtgaaatcaagcacatcatcaatgatctgataggacataccgacataatagccaaaccagtaaagggctttatgtgttttctcatctgtacctgctgctatcgcacctaactggcagctgcctgcaatgagcaaggctgtttttcgtttgattcttcttaagtatgtacgcaggttttgatccatattgtatttgtctttcacttgctcgatttcaccaagacagagctcgacgaccatctttgacaaaatttcatgcgccattgggtgattgatctttgtcatatactcaagtgatcttgcaaacatataatctcctgtgtacatggcaattcgattgtcccattttgccttaatcgttggcttgcctcttctcagctcagcatcatcaatgacatcatcatgaacgagcgatgccatatgaatcagctcaagagcaacggcaacatatttaattttattaatgtcatagtcgccaaacatgcctgaaaggagaacaaaaacggggcggattcgttttccgcccgcttgcagcaaatgaagacctgcttcacttaataatgcataatcagagcgaactgtttgttcaagctctttttcaataatatcgatatcatgatttaaaaaagagatcattgcttttagtttcattattttcacccaaatatcgtttattcaaagcttctttccgatatgtgttgctgctacaccgcctgtaaatggatgatacgagacatcagacagacccgcctcttcgaaaagagccgccagttctttcatgccagggaacgctttggctgattcttgaagccatgaatactcctgatagcttttggcaaacagtttaccaaagagcggcatgatgtatttgaaatagacatagtaaccttgtttaaacccaatcatttcaggctgtgatgtctcaagacagacaaccattccaccaggcttcacgactcttgtcatttcctttagcaccgttaagtaatcagggacgtttcgtaggccaaaaccgatcgtgacataatcaaatgtgttatcctcaaaaggaagctccatcgcattgccgtgaagcagttcaatttgattatagcccccagttttcaccttcgtttctccaacactcagcatatttttactaaaatcaaggcctttgacttcgcctttttcgcctacagcatcagcaagcgcaatggtccaatcggctgttccgcagcatacgtctaatgctttggctcctttttgaacattcatgagtttcattgttttatcgcgccactttttatgctgcttaaagctgatgacagagttcatttgatcataatttttataaattttttcaaatacaccgtgtactcgctgttcttttgattgctgcatgacttacccttcttccactttctgatggtacgcaggctcatttttcatatgatccaagcgatttaatagctctttttgaacgaccggagatgaaacaagatgctccttgatcgatcgtttggccttttcatagccttccttctcaaagttgtcaaaacatgtataggcgtccgtatagctatcgttcaaaaaaagttttaaatgtttgtcatcttctgcttgtttcatgaaacgcttataaacaaggaaacgacttgcaatctcattccaatgcgttaattgaaaatgctcagaaaccctttggaataacgcagactcaacagttgctacacttttgtaaaagtgcgctgcatcttgaatggatcgatcatacagtctaattttatgttcattgatctctttgatcgccgttgcgagcgtgcgaatcatgtagatgtctttcatgtcagagagaagagaataatagagaccgctgaaatagtctcctgctaggatggtcagctgacgatttttgaattcgtcttgtttgatggctgcagcagttgtgacttcgtcatgggtatcaagggcaatttgtacaagcatcgccgttaaaatataattttcttttttctctgcatcaatttgagcttcatcaaacattgcatgaaaaagaaggagcttatcttcatcgatgagtggcgcacgtaaatgcttcgccaaataaggatgagaaagctttttatttaattttatatttagattagataaaattccgtagatgtcttgcaaagatatcacccttgtcccaaaaattacagtttcatatgtagccctgcacattgtatagagatttattataccatatcagctctcacttttatgctatcaagtgcattcaagtgcttatttctttgcttcgctttgaatttcaccgaagcttgtttgaatgacagcatcgcctcttactttgatcgctgacgtatgctcagtaaattgtgcaatgatgacttcacctttatcgagcttttcggaatggtgaaatcttgtatcagagcctctagttaagccgatgacatttacaccattatcaatggctttaatcactacaaaatcagatgctttattttcactcaatctgttcaccttccatctattgaattagtcgtttttaataaaggaaagcacttctgctcttgccgccgtatcatttgcaaatgtaccgcgtactgctgatgtcacggttttagcacctggctttttcactccgcgcatcgtcatacacatatgttctgcttcaacgacaatcatcacgccatgcggattgagtgtttccaccatactatctgcaatggttgatgtaatgcgttcctgaagctgcgggcgtttggcaacagcctctacagctcttgcaagtttgctaagtcccgttacttttccgccgcgcggaatataagcgacatgggcttttccgtaaaaaggtacaaggtggtgttcacacattgaatggaaagcaatatcttttacaagaacgagttcttcgtggtcttcaccaaaaatggttttaaaatgttcttttggatcttcatttaatcccgagaacacttcttcatacatttttgctactcgttttggggtatcaagaagtccttcacgatctggatcttctccgatggcttttaatatatcgcgtactgcgtgttcaattagttctttatttatttcactcatgtattatatcctccaaaggcgattacatttcaatcagattctagcacacttcagatcctaaaagcaaaggagagcgttctaaacgaaccttttgattcaaaaggaaaagccccttatgaaaggggcttttctagaccagtgtgaaactgtatatgtataactcctgcaataggatcattacacataacgattatttacctgccaccgcgtctttaagtgctttacctggtttgaaagcaggtactttgcttgcagggatttcgatctctgcaccagtttgtgggttacgtcctttacgagctgaacgctcacgtacttcaaagttaccaaaaccgataagttggattttgtcaccatttttaagtgcatctaaaattgtatcaaaaacagaatcaactgcttttgtcgcgtcttttttagataactcgcttgcttcagcaaccgcgttaataagttctgtcttgttcatgcctttcacctcctcccaaaaatatgcattcagtagattgttatcatttcttcacaattcatcttctttctatacacttttttcgaaaaaaagagcgtctagaaagcgttatacatggctattcattagaaaacaactctttgaaggaatgtttgtccaacaaagtgaagattttctgtaagtagattaacacatatgaaataccatatcaagcattttaaagggaagaatccttattcgtcaaggattaagggcacttttgcgaacgaatattcctaatttcagcctgaatctgactaatctttatacatttgtctttttatgactcattcaatacgcaaaaaaagacccctgtcaatgagaggtctcacatgctataggataatggcgatcaaaccgcctgatccttcgttgatgattctttcaagcgtttctttcagcttataccttgcattttctggcatcagcgacagctttgcttgaataccttctctgacaagggagctgagtgagcgcccaaatatatcagaattccaaatcgaaagcggatcatcttcaaagtcttgcattaagtagcggacgagctcttcactttgtttctctgttccaataatcggtgcaaattcactctctacatctaccttaatcatatgaatagatggcgcaaccgcctttaatctcacgccgaatctcgagccctgcctaatgatttctggctcatctaaactcatatctgacaaggccggggccgcaatcccgtatcccgtctgcttcaccatttttaatgcgtctgatacttgatcatattctgtcttcgcatgcgcaaaatcttgcatgagctctagaagatggtctttccctctaatttccacaccaaccacttcttttagaatatgatcatatagatcatctggggcgtacaggtcaatctccgcaatcccctgacccatttcaatccctgctaagcccgctctttcaataaagtcaaattcgctgaattgaccaacgacacggtcaacatctcttaatcttttaatatcctttacggtttccttcactgaatcctgataactttctctcagccaatgatcttctttcagcaccatgacccagcttggcaagttcacattcacctctaggactgggaattcatataatgcttcacgaagcacactaaggacgtcttgctctctcatactttctacactcatggcgagtactggaatatcatatttttggctgagttcctgccgcagcgcttctgtttcagggtgatatggcctcacagagttgattaccataataaacggctttccaacctctttgagctcatcaatcacacgttcttcagattcaatataatcatgtcttgggatttctccaatggaaccatctgttgtaatcacaacaccgatggttgaatgctcttgaatgaccttgcgtgtgccaatttccgctgcttcatggaacgggattggctcttcataccacggcgtgttgatcattcttggaccattttcatcttcatacccgcgcgcaccagggactgtgtatccgacacaatcaacaagcctgatgttgacatcaagaccgtcactcacatggatcgatgccgcttgattcggtacaaattttggctcagtggtcataatggtttttcctgctgcactttgcggcaattcatcctgtgctcttgcacgatctgcctcattattgatattcgggagcaccacgagctccataaactttttaataaacgtagatttccctgtacgaacagcgccaacgactcctaaatatatatcgcctcctgttcgttcagcgatatccttgaaaatatcgactttttccaagtgatcccctcccggacttgctatcctcgttttcaaataaaatactctattcttcaatcaaactgtgcttgaaaggtgtctggacaatatatgtgtatgacgttgtcctatttgaatatgacaccttttttgttttgagagtatgtttagccataaaaaaacctttctcctcatttatatgcagaggaaaaaggttcattcttgtttatgacgtctttttttctaaaaagtcaggctcaccttttttgttgatggtatatgggacagaaaacgcgggtacaaacggggtttcctgccaatagacatcttgaatgttttcacctggtttgagcttttgtttcgtattcttcaaaatatgagcaaaatcacttcggtagtccacatagatttcgccatttgatgaaatcagtaacgggagggaattccccgtcaccggactcatgaccgtaggcggcgattttaagcctagctttttttcatttaacgtatataaattgcttgatactactttgccatatggcggatatgtatgttcatcttgatatattttgattctaagccgtaattcactgatggtttgcgtcattttgacatcaagcagtttcaccgttggttttttttcgacgtctgtgaggacatacatatattcgcccccgccttcaaaagatgtagacggtacatcgtgtaaatatcttggtgacaagcgcttaaagtcgatgacgtacttctgataaaccggcgtgtctgcttctttcgtttcaatcggcaaaaggccatttgttgctttttgaaattcctcaatcgctgtctgaacgctttgcagctgttcttcatatggcacacggttttcagttttgcgattttctggatacagacatcctgttagtaaaataagtgctaacaacgtgacactgacttttgctttgatcatcacattcttcctttttctttattcattgaccggcccgctaaatacaactaaaaacacaatgatacctgatataagcatcaagctgtatgcgacggtcgaggctgttattttaagaaaccggcttttcagcttaaatcgactgaaataaatggttactacggctaaaaacatgagccccattgaaccaagcgcaaaccacatcttgattaaagcaaaactcatcgtgcctgtcccccttcaaaacgaacaaattgtaagcgtttatatttcattctaaaccaaaaataaggtaaatatcaatcatttttccaatcattcagaaaaaagcgcataaaaaaactgaagcaaagagggggactctgcttcagtcattaaatcgactatttttcctcattctgtagaggcaaagctctattcaaacttcattgctatgttatgcaagtcttccccttcttgcatcctctacatgcctaagttcagtcttccatttattttgtttggttttcaaacatgttcacaaggtcttccatttcatgtgttttcacacgtgccatcaatgattctacagcatcgtcgacctttttcccttcaaataagacgtggtaaagcgcctctgtaatcggcatgctgaccttgtattctttggagagctgataagcgccttttgttgtacgtacgccttcaacaaccatccccattttttcaagcacttcttcaagcttataccctttaccaagtagatttccgcagcgccagttacgcgaatgaacacttgtacatgtcacgatcaaatctcccacgcctgttaatccggcaaatgtcagaggatttcctcccatttttgtaccgagacgtgcgatttcagcgagtcctctagtgatgagcgccgctttcgcattgtcaccatatccaagtccgtctgtgatccctgccgcaagagcaatgatatttttcagtgctccgccaatttctacaccaatcacatctgggtttgtgtatactctaaagttgttgttcatgaacaaatcttgaacaaattgagccgcttcaatattttctgatgagacagtgacagttgtcggatgacgcaagcctacttcttcggcatggctcggccctgataagacaacaacagcttctcttttctcatctgggacttcttgttcaatcatttgagatattctcagaagtgtatctggttcaatccctttacttacatgaacaaacggcactttcgatatgatcagctcatttgcctgctttaatacttcacgaatggcctttgttggcacagcgacaataatagcgtctgtcccctctaacgcctgcttcatgtctgtcgtcgccttgatagacgctggcagtgagacatttggcaagtaatcatgattttcatgtttctcattgatttggtcaatgagctcttgtctatgtccccacatgtgtacatcatgatgattatcagctaatacaagagcaagagctgtcccccagcttcctgctccaagtactgaaattttcttcattctgctcaccctttttattttctcgctctcgcaaatattttaatcggtgttccttcaaaaccaaatgcatctcgaatgcggttttctaggaaacgttcataagaaaagtgcataagctctggatcatttacaaacaccacaaaggacggaggcttaatagccacctgtgtcgcatagtaaattttcagacgctgtccattatgagtcggtgttggattcattgccactgcatccatgatgatatcgttcaaaatattcgtttgaacgcgcatcgcatgattttcactagctgtaataatggatggcattaacgtatgaattctctttttcgtgagagcagacataaacaagacaggtgcataatccaggaattgaaaatgctcgcgaatgttttgctcaaattccttcattgtacgctcatctttttcaacagcgtcccatttgttcacaacgatcacaacagctttaccagcttcgtgtgcatagcctgcaatacgtttatcctgctcaataatgccttcttcaccgtctagaacaacagcgacaacatcagaacgatcaatggcttttaatgcacgaagcacactgtatttctctgttgtttcatatacttttccttttttcctcatacctgctgtatcgacaatgacaaagtcacgctgattgtacgtaaacatcgtatccacagcatctcttgttgtaccagcgatgttgctcacaatgacccggtcttctccaagcattgcattcactaaagaagatttccctacattcgggcggccgattaagcagaactgaacaacttcttcagcatactgtgtatctggtaaatttttgaagtgttctgcgacagcatcaagtaaatcacctagacctaatccgtgcgttccagaaatcggatacggttcgccaaaccctagtgcataaaagtcatacacgtcacttctcatttcagggttgtccagtttattgacagcaagtacaactggctttttcgtgcgatataaaatttttgcgacttcttcgtccgcagatgtgacaccatctcggccattcaccataaagataatgacatccgcttcatccattgcgatttctgcctgatggcgaatttgcgctaaaaatggctcatctccaatatcaattccaccagtatctattaagttaaagtcataatttaaccattcagcagagctatagattcgatctcttgttacaccaggtgtgtcttctacaatcgatattctttcgcctgcgattcgattaaaaattgtagattttccaacgttgggccttccaacaatggctacgacaggtttacccatagtacccttcctttcaatccagccgcgattcaatatgttcatcatcatgtttcaaccgggatttaaaattttcattcagttttatgaaataaacccttcaaacatgaagggttcaacttatatattatatcaatttttaatcagaccacaatgaataacttaaaaatgtttgacaatcaagtaaagatcttctccaattccgtgtgcaattccatctaaaatggcctctaaattcatggcgtacatgtcgagttcttctttattttcacagaaaaaaacggctgttccgcccatgacccgctctttatttgttgtagccacagcgagtataaattgttcaatggtgttcgccatgctctattacctcactttcttttttatgaactctgtcggcattctgatggcattttctaaaataggcacttcttccaatacacggacagccaaatcttcacgataccattgcggtaaaatgaacacgccaagtgtgccgttatttagatcacgttttgcgagcggacagagcgatggttcaccagagtcgcgatacacaccaagtacgttggataaatcaaataaaatggcttgccgctgcccaagattggcaatcgttgtggctgagttgaaatttttcggcgtcaaaataaagcccatcccatgctctaaaatgagcttttgcttttcgggcagtccgatattcatgatgtaaatatcattcacataaagccctgccccatcaaagcgaagctctcctttttgtatattgacaatatcctttaattggctgccagacattaatagctttgccaagaaaaaacaaagaataccgaccactgtcccaataacgagcgagaagaaaatacaggctgtggtcgtaatcagtgccgtgagaatcgcaatataattccggctttcaaaggcaatggcaatgccttctatatatgtactgcctcttgagactagctcatatgaatccatttgagttaacgtatttctttccatattgcggacgtctcggaattgtgtggccgccagcgtgagaaaggtaatcgccgtaaattcctcctgaatgagtgcaggcataatgatcgcaccaagtcctgaagcgataaaaccaagcgcaatatgaatcacttgtccatgaatatacgtggggtattgccggtaatctgttcttaacatataaagtctggccgccatcccaaagatgacaccaataatcacaggaaacgtataatccgtcatgttgattttgcagccccttttactggttttcttgatgaacgggcgttcaagagcttttcaagctgatcgacacctaataggaagatggacccttgaacaacaagggacagaaaagagagatctcctatgacaatcgatgatgtcaggcggtgaatcgtcagcgcataaagggcttcgccaagacatacagacatcatccatagggtgactcgttctgtgaaatgatgtccatatgtcaaagacatcaagatcagcaaggcaaatacgacccaatccacttttattagcgtgaaccaaaccgggtcatataatgcaaaaatcataaaaaaggcatatgcgctcaccatggagcctaattgcatgattctcatcatttgatggccagaccggaatataacgaaacctgcacatgcatataaaaaggtcatcaagtaccccgcattgaggctcatatcaaacatggataccatgaaatgactacatataatatggacgaggacacaaacgcctagcatactgcgccatgagcttttttccataataaatgtcaccataatccaaacgaaccatatggaccaataatagtacaaagcctccaacgtctcatcacctcaattacattatgggaaaatccccaatttttaaacgtaagggatcgctttggacattgtatgaaataaacaagaggtgacactctaataattgaggagggatgcatgatgggaaaagatagacaggaaaaacgcttaaaggcatcaaaaagagtggaatctgaccgtgatcaatccattcatcataaaggggcaacagcattagaaggtccagatagcgcacgaagaagaaatcaataaaaaaaggcatgtgatgaccacatgccttagatgtttaggggctaaacttgattttagtcctttttcttctttgatcttagactatagtacgttgtgtcgatgcctctttctttgagccaatgacttgtttccccggaaatgacaacctgggtttgtctcagttcttcaatggtcttcacgccaagcactgtcatcatcatcttcacatcttcttgaagatctatgatatcagcgatgaggccgctctcccctccgccagtcagtgattttaagaaaaagccagctagaccagcagcggatgcgccaagagcaattgattttgttacatcaagggcgtcttgtatacctccagaggctaaaaccgtttgatctggaaaacttgtatgtacttcagcaagactcgctgctgttggaatcccccactggtcaaaataatgaagcgctttttggcggcgaagattttcgatctttgaaaagttcgtaccaccaaatcctcctacatcaacggccgcaactccagcacgaaataacttttttgccgtttccttgctcatgccaaatccgacttcttttacgacaacaggcacaccaactgattcagcgatggctgcgatgcgctcaagcgcccccctgaaatcacggtctccttcaggcatgacgatctcttggatcacatttaaatgaatctggagcatattggcctccagcatctcgactgcttccttcgcttgcttaatcgttgcttcactgcctaagttcgcaaacacaattccatccggattgacttttcgaacaacttcatacgtacgtctttcttctttatctttcagtgcagccatttgtgatcctactgccaccggaatattcgtttccttcgctgcgatcgataaagagcggttgatctcataggtcgactttccgcccccgccagtcattgcattgataaaaattggcgaaccgaaagtcagtccgccaattgtcgtatgtgtatcaatttgtgatgtcgcaagatctggtagaccgacgtgaacgaaggaaacatcttttaaacctgttgctgcatgctgtccagtggacaaggcatgttcaatatgctgcttctttctttctgctctcgtcaattttgatcaccaaattattttaatttattaagcttatcgccgatcaggtcaccaagctggaatccgcttgtgttttcttctttcgcctgatattgacgataattctcttcgatttgtttttcaggattttcttctaaatcacggatgcttaatgaaatgcgctcttcatcttcattcacatcaagcactttcactttcacagtctgcccttcttcaaggacttcttgcggtgtaccgatatgtttatgagagatttgggaaatatgcacaagtccttcgacgcctggcagaatttcaacaaatgcaccaaagctcacaagacgttgaacagttccttcaagcacatcaccttgttttaccttttcgccaatctggctccaaggtcctggtaatgtttctttaatagatagtgagatacgttcgttatcacgatcaacagcaagtactttgacctggacttcctggccttcttccactacgtcagatggcttttcaacatgcgcatgggatagttgagaaatgtgaaccaatccatcaatgccgccaatgtctacaaatgcaccaaaatcagtaaggcgctgcactttaccatcaatcacactgcctacttcaagcttttgcaggaagtcttgctttttgtctaattgctcttgctccactactgcacggtgcgagagaatcacacgatttttttcgcggtcaagttcgaccacgacaagtgagagtgttttacctttgtagtctgagaagtcctctacatagtgcgcttctacaagagatgcaggaataaatccacgcacaccaatatctacgacaagaccaccttttacaacgtcttttacttcagcttcaaatacttcttttgtctcaaactttttctctaggtcttcccaagcgcggtctgcatcaacagcacgtttcgataaaatcaaagcatcgtcttcgacttttgttactttaagctctaactcgtcgccatctttcacgacatctgatgctttttcaacgtgaagacttgataattcactgattgggatgatcccaggctgtttcacattgacgatatctacattgacatgcttgtcctcaactttagaaacaatccctttcactacatctccaacctctggtacctgaacatcgatttgattcatttcctctgtcatttcgataacctccttggtccaaacctacacagcttagttaaaacgactgggcgaatatgtgtcttaagcatgatgattaccagccgaatatgtattaaagaaacattcaaatcaatataattgcttgaatgatcaataaaaatagtattagtataaacttctaataaaagaccttgtttgtcaagagataaacctctaacttattaaagttttctaaaatttcttactgtttctccacgcggtctgctgcatctaaaattttacctgctacctcttgaatggaaagagaagttgtgtcaatttcaatggcgtcatccgctttcttaagtggcgaaacttcgcgctcagaatcaagtttgtcacgtcttgcaatctcttcgatcagctgatcgtaattgacatcgtagccttttttctgattctcttcaaaacggcgttttgctctttcttctactgatgcaagcaagaaaattttcacttcggcatctggaagaacgtgcgtacctatgtctcttccgtccataacgacaccgcctttttgaccaagctcttgctgcctgcggaccatttcttcccgaacagctctgtgctttgcgacaaccgatacttggttgctcacgcggtctgtgcgaatatcctctgtgacatcggtattgtctagatgaactttttgaccctcgtccgttgagaccagatcaatcacagttttttttagtaatgcatcaagtgctgtttcgtcctcaaggtctacaccatgattaagtgccgcaagtgtaatcgcgcggtacatggcacctgtatcgatatagatatatgatttttttgctgcgacaatttttgccacagtgctttttcctgctgcagcaggaccgtcaattgcgatagataatttctttttcataatacctctccttgattgaatctcccttatgaattgtaacacgatcaccgctcaaacgggggaattttctatcaatccttctgcttaaacgtttcgatccaatcttcaatgctcatgttatttacaccctcgtattgcacgacttttgacaaaaagagttctccttttgtcaaatgaagtgtgatctgaacggctaataataagacaagctgaatgagcaccgctttcaataaccatctttccattgtcttcatacaaaaagcctccacgctagattctttcacctctagtatggaagcttttaacatcctttattcttatgctttttttacccgtgttaaaagctgctgctggaagcagtacttcataatgtgctgctggtggtcatttgtaatctcagaaaactccatgatcgctcttgttttgccagtctgctcatcttgatatactcgattcatctctgcaaccgctttaattttcacaggctctttcagcggaagttcaaactctgtgaccacttctccgtattctttcaatgagacaccttcaggaacagcaattgctaagccgccagcactcatattgacaataaacgtgtcaaaggcttcttcatccgtttgcgtgatcgccgctttgaccattgtatcgactctcaggtattctctgcgctgaagccgaatcatttcttcttttggcggaatggaaatgacaatcatcggaatatcttctttcctctttccgatgacttcgcttgtacatttgtatggaatttgattttcatcgaaaaagaaaacggtgatttctgtttgctggtttaaatagatcgtgcggcccgtttctttatcagctggataattaatgcaaatatcatcgttattattttccaaaactttcgattttgcaattttcacttctttgttctcattgacgtattcaattgtgattgcatcccctatttgtaacattcctcatcactcttttcatctgtgaaatcatatcctctcctatattaaaccatgtataaaacaaaaggaaaaggcttagtcgccttttcctcgcttccttttctataggtctttatatataggttctgcgttttttagtttatctactcgttcttcttttccagtatccgcattaatgaacattcggtacgtatcgttcttaatagttccgaggaactcatagcacaaaacttcctctgacatatcattttgaacaatcgctacatgagaatcttcgatttttacatgctgattcaatgttttcttcgcttctttttgtgagattttaggtgcttttatgtctcttgttttatgattcgttaaatagtctttcgctgaaaatccaaccacctcaccatcatctaatgcgaccttcatgcgtatactatctggataaagcagtacatttttttgaagaggtacataggtaaatacaccgatattatcaaattgcgcgctttcatctaaatggaacgactctgcatcaaatccttgcttctttaagaagctgagtgctttttctgatgcatcatttaaactgattttctgtttttttacgtctcgattttgaagaaggtagactgggtgccctcctttttcagtcaagtctaaatagaaattcgctttactatcaggatctgacatcgataagctgtacacatctcgattggttttgcttccgctttttctgaccttaaaatgttgattatgatcaggtgcgaattgctgggcaatgcgtatcgcttctttctttgagatctttttcccttttaaatgattgtagccatgtgtttctgattctgtcgacacatttgtcggaccgagattgacatccgcaaatgcatctgcatttctctcgactgttttcaacccgtcaatgatggtgttatcattctttcggtcgccatcagcaagcgccatttcaacatccatccattttaaatttttattgaggacaaggtgctgtacttgtctcagttcgttttggatatcagccgcttgatgatataaagacgtaatggttttgtgcgtatttttgtttaatggttcatctgataaggatttgactgatgatttgtagctaaagtctccgacattcgccaaaaattcttccgttttgttaaaaggcattaatgtgagcggaagctgactcacattgttatgtgcttctgatgacattctccatacatctgcaagtgctggtgaaatcgacgtttggctgttcatcgcaagcgttgccccaagtttgtcgtgcagctgatccacttggtatgttaaatcgtgaaaagccctttgatagttgttctctgcgtgcagcagcactgcgtctttttcttgatgctctttatagccccaataacctgttgagatgacagcaattcctaaaatggcaatcaatattcctctgatcatttatttacacctctttttattcgcagaaaatatgtttcccgattcgtttaatttgtggtcttccccaaatccatggactggttgctgtatcaggattaaagtaatagacggcgctctcagacgggtcccagccgttaatggcatcaaacacagcctttttagcagtgtcatttggcgacatataaaattgaccatccgccacagctgtaaatgcaagcggttcaaaaataacacctgcgatcgtatttggaaaagtcgggttgttcaatcgatttaagataacggcagcgatcgccacctgaccttcatacggctcgcctcttgcttcgctataaacagcttgtgataagagctgaatatcattactagaaaaaccacctggcatgttggctgccgtttgtttcggtgtttggtttgcttgctgattgcctgactgattcccagtctttccagatgtcccgcttcctccgctttgacttttttgattctcttttgccccttgagctgtctttttttgtgagcttcttttcgcagaagcttttgtttgctgatcaagaggtttcccgccataatgggtaaactcattccccttttgcagctgctgctgaacaaagtctttatagtattttgtcttttgaactaataggctttttgtttgtttacctacaagtccatcgaccttctttacaccatattggctttgaaagttgcgaacggcccagtacgtcccccagccatatacaccatcaattttgccattgtaaaagccattatattggagccgtgcttgcagctcgactacatcttctcctgttgcacctcgctggatgacttgactggtgaaggcttcacttttttcagctgacatcagtgaagctgcgagtagaacgattgagaagataaggacgatttgtttcatgaaacgagctttgtccatatttgatcctcctgtacttttgatgtttgaatatatatttcttccgatccctatttttatacattcatcacaggagtgaattggatgaaaagacaaaaaaaacgccctatcaactgataggacgttttccacattaaatttgcaccattttcacggaacgagccttttttgctttccgcaggccaaaccaccataaaaaaatcatgaatggcagcataatatatccccaatttctcatgccaagaagaataaaatcatataagccgtgaaaaagtactgggagcgttaaagataggatcaaccatttcacttgctctttttttgcagagaaacgggctttcccaatataaaaccccatcacaacaccgaataaagcgtgacttgagacgggtaataaagcacgggtgaacgcatattcaaccccatgcccgaccaagtaaagaatattttcaagtgttgcgaaaccaagtgagacacttgttccatatacaatcccatcatagtgttcgtcaaactgggcatgcgcatagacgctgaccattaaaataaaccattttaaagattcttctaaaaaacctgacgtcacaaatgaaatcaagatagggttcgttgcaatatgctcctcttgaaggacatattgaataaacatggttggaaacacaagtataacgcctagcataaaagatctgatgaccatgtgaaccggctcattgtcgtactgatctttcaaataaaaataacttaaaagtgcgatgccgggagctaaacctgctgagatgattgcgatcataaccagacctctttccctacattatccttcattatcgtaccatgatttaccctttttttatatgactcgagcccatttttatgaaaatattcttctatataatcccattttatatcaaaaagaaccgaatccctcagaaggatccagttctttttttatccgttcattcttttgttgatttcttctgcaataagccccccatgaaaccttccattttcaatgaaaatttcattggcattatttccagctgcaatgactcctgcaatgaaaataccttctacgtttgtctccatcgtctgttcatcaaatgctggacggcctgattcttgatcaattgtcacacccattttttctaagaaagaatgatctggatgatagcctgtcatggcaaaaacataatcacttttcactcgctccgtttgatcttgctggtttgtaaaaatcacctcttcttctgtgatttccttcacctgcgctccaaactccattcggatggttccattccgcacaagcgcttcaaactctggtaaaatccaaggtttgatgctagacgaatattcagttcctcgatacagcacagtgactctgcttccgcatttcacaagttctagcgctgcatcgacacttgagtttttcccgccgatcaccgtcacatctttatcaaagtatgggtgtccttctttaaaataatgatacacatgaggaaggtcttctcctttgacgttcatatagtttggatgatcatagtaaccagtagcaatcacgacataatcacatgaatagtcgtcttttgatgtgctcacggtaaaacagccatcttttttcgtcacagcggttactttttcaaaggcatgcacacgcaggctttttcgtctgactacttctcggtaataagaaagcgcctggatacgaacgggcttgcgattttcagtaataaaagcgacatcaccaatctcaagcttttcacttgtactgaaaaaggtttgatgtgttgggtaatgataaatactgttaacgacattccccttttcaatgacaagtgcatcaattccgatttgcttgaacgcgatggcagctgatagcccgcatgggccgcctcctattatgatcgctttttcttgtttcatttgttccactcctgtcgtttcaatacaataacaactgctagctgtttaatgatttgttccattccataaaaaaatctcctatttaaggataggagattttaaggcgcgatgcaaataagccgcttaaatccagcctctgaatcgagaagcttcagccattttacgtacgccgaccatatatgcagcaagacgcatatcgatgcggcggttttgcgccatttcataaatattattaaatgatttcaccatcatatcttctaaacgagtttcgacttcctcttcagtccagtagaacccttggttattctgcacccattcaaagtaagaaaccgttacaccacccgcactcgcaagtacgtctgggacaagcagtactccacgatctgaaagaatttttgttccttcaagtgtcgttggaccatttgctgcttctacgacaattttggctttaatgtttgccgcgttatcttcagtgatttggttctcaatggctgcaggtactaagatatcacaatcaagctcaagcagctcttggtttgtaatggtatcgttaaataatttagtcacggttccaaagctgtcacgccggtctagcaagtagtcaatatcaagaccatcttcatcgtataatccgccgtaagcatctgaaatccctacgatttttgctccggcatcatacatgaatttagccaagtagcttcctgcatttccgaatccctgtacgacaacacgagccccgttgatgtcaattccttttttcttcgccgcttctttgatgcagatcgtcacaccttttgctgttgcagtatcacgtccgtgtgaccctccaagaacaattggttttcctgtaataaatcctggcgagttaaattcatcaattctagaatattcgtccatcatccatgccataatttgagagtttgtaaacacatctggtgctggtacatcttttgttggaccaacgatttgactgattgcgcgaacatagccgcggcttagtttttcaagctctctaaatgacatttctcttggatcacagataataccgccttttcctccgccataaggaagatccacaataccacattttaaactcatccaaattgaaagcgcttttacttctttttcagtaacgtttgggtggaaacgaatgccgccttttgtcggtccgacagcatcattgtgctgtgcgcggtaaccagtgaaaattttcactgatccatcatccatccgtactggaattttgaccgttaatagacgaattggctccttcagcaattcatacacttcttgcggataccctaatttgtctagcgctttatgtatgacggtttgagttgactttaaaacatctagcttatcttctgcgttatgagcggcgttttgatcggctgccattaaaataaaccccctagaaatctttcatgatctactgctccctttcaagcaatagtatacaccttcgtactggtaaagcaaaggtaaaaaacgttttttatcaaaataaaatatcagcgtttataaatataaaaaagaatataaaaaatactgttgtttcatcacaacagtattaaatataatagaaaaaagtgattaaaaatacatttgaatcgttttcactgcatcatcttgcatgatcacttttccatattcttttagccgatgaatcgttaatgtcgtaggagaaccaaactccgctaaaatggaaatgactgtatcagctgacagttcttcaaaatcatctaggctgagaaaatattgaccttcataatggtaaactgtaccccctaaaagtccaatacgacttaaactatgggacagttgaatcacatcttcaaacgaggcaaattgatagagcacatgattactctcgtcgagcttgacttgcatctcaatgtaatcttcatcaaactcatcatcatcagcatcttcctgctgactctttgtgacaatgacgaccatcccctgcgcctgaagagaaaatacttcaacagcaatcggtccactcgcttcaaaaccgagctcctgattcgcctcgttcatcatgtctttaaacagctgatggactttgaacgaatctttccaaaggtcttctttcgtaagaccccggtctgtcaggtcatctagtgtgagaaaaattttgattttattataattcagacgctccagtcgcataacgttccctcctgcctcttctaaacacacatcatactgtagtatatgagatgatgagtcataggttcttaattttgtattcagtttacactgtgtcaagacggaagacaagcatgaagctatgcttacggtgacttttatggaaaatattgagggtgcagcaagtcatcgcgtttttacaggcattaaatagatcagatgggtttctggttctgccccgagacgcattggaatctttgttgttccatagccattactaatgagaaaaaacgcgcctttgacctgacctgttcttcctttttcatacggaccaaattttccgattcggatctgacctccatgcgtatgaccgctcagaacaaggtcgattccctcttcttcactcatcaaatgatgtacatctgggttgtgtgataagagaatattcacttcatctttcacaaactcaggccgtattgcttcataatccgccttttcaagccgaatatcatcgatacctccaactttgattggctggccttcgaaatcccacacagccgtttcattttgcagagtcgtgacatcatatgcatgaagtatctctttaaacttctgctggtgcagctcatgatcattatttccccaaacaaaataaacgggcgcaattcttgataaacgtttcacattttcttcaatcctggcgtagggtacacctttttctgctaagtccccgcctaccataatgacatctggttcttcttgtgtgacttctgctaataatgagtcactaataagacgccggtgtgtatcagaaataaagaaaatcactgctggtcgatctgattgaagcgcttctattgtaaagtaatgctttttgatgttgttttgttttgccgttttcaccatttttgccgttacacacacacctgttgtaacagccgcaatggcggcagtaaatccgatggcatatttcatcataaatggctcccttgcatatgtttcgttcataagacgcttgaatgaaaaaagacgtttcaactattaaaacgtctttttacacatttatttactttcataatagagattaatgtcatattgcttctgcatatagtgaaaaaccgcttcacgctctttccactggtctgattgcggccataagtctgtgcttttttgtataatctcacatctaagccgatgatattcatcctcagccttttcctcttttttcttatagtaataagatgcgtaaaaagcaaacacctcagccattatccaaaatagaaagatctcatgaccaagcagtgttgcaatcatcgcttccggctgaagagagcctcccttatttgccgttattacaaaataaaacaaaagaatcgccagcgacaatagggctgtccattgccatcttttgcactgcttagcaaagccttcatatttgtgctttcttttgatcaacgtttccatcattttctgtgtcggctgatccatatagcggctgattacgtgcaatgtcatcacatacaccctgtcccttttttctacatatgtatgtgctttttcattcgatcatgtcaggtaattagttttccaatggaatgttgagtacttgaccactgtatacactgttcccatttaaatgattataggctttaattttctcttcacccgatcggtttttgtaatatttcatcgagattcgatacaggttttcctctgggcccacagtgtgctgtacgacacgaaccggcttttcttcctgcttctttttctcttcggcttcttttcgttttttctcttcttgttgtttttgcagtgcgagctgctgctgttcacgctttttcgcagctgcggctttttcacgctcttctttctctttagcggctttttcttttttcttctgctctgctttttcttttgatcgctgcttttctttttcttcatctttctttttcttctcttcatcagacgcatccgctttatcatcgctagcattttttgtttcgacaagtgctgacggaactgggtctgtgtcagcacttgaggttttatcgatgtatacaccttgattgttattatcgttgatttcctttgatgtgtaatagatcaatagaaagaaaacagtgatgacgatgataggaaagataatagccaatgtcgtaaacaaaggattgcgcacttttttcgtgcgctgcttcttatattcatgaaagtcttctcgtgtaggaaagtgagagtcatcagaaggatgtactttttcttcaagaatttcctctacatcgtcatggttgtttgtcagctgctccttctttctctgcattctcgacatttcttccatgttcatccctccccttatatttcaaacgaatttgacaagcaaagactaagtcaatgacaaaatgagtcatgacaggaacaaataaattccccgtccactcgtataaaagtcctaaaaaaatactaatggaaaccacgaggataaacaagagtatttttgataaatagcgaaagtgaagaagcgcaaacacgatgctggcaatctccagcccaaattgctgttgaacgattccgcgaaatagtatttcctctgaaaaggcgataagtagtgctaaccaaacaatatgcgggatgcttcggtttttgaacatcttttcatttaaaccgccatcatcatacatatgagcgggaaacaccttcatgacaatcgcatccacaatgatgacgagcaaagcaccgccaattccatatgtcagaatgcgcatatcatgaatctgccaaagtgctgtaaaatccgtccattgatcgaacataaatatgcctagtaaaaaagaaacgataagcatgaggagctgcgtgaaatacagctgttctacgacttgtcgatcggttaatttttcaatgattcgacgatgttgttcaatcaatactgcgcctcttttgtcagatgaaacatacgatccagcacggtcttccagtgtttcatttcattcagctccaatgattgatcttttttttcataatcagacaggtcaagtccgcaagaagagcagcaatgatcagaggacgcgtgctctgtttgattaagctgttcgtgaaagtatgataacagagattgtctaaagcagtcatgacccatgatccgctctttaaattgccacacttttctcagcttttctgtttgtctgtcctgcaatttttcttttagattcatgaggattgccgggcgctgttcggactcatgcatcatgtaataatgcgtcagcattcttgcacgggtctcctgaagccctgtttccattaatcgttcacgtaattttttttcatcatttgtctgcatttgtgtgagctgtgctaagtagaaatcaatttctggatcgtcaaatccttctgcttggatcaagtgttgctgaatatctgcatcctcttctgtatataaaagaatgctcacactgtttttcccatcccttcccgctcttccaatctcttgcataaatgcttcaatcgattgcggcgggctcatatgaatgacaaatcggatatccgctttatcaattcccatgccaaaagcactcgtgcagcaaatgagatcaagctgaccgctgataaattgctgctgaatgagcatacggtctcctgcatccattccgccatgataaaactcaacacgctgattggttttttgtttcatccagagtgcaagctcttctgtcatttgccgggtcgggcaataaataagacctggtccttgcaggaagtccgcaagctcaatggcccgtttctcttttgcttctttcgattcgtgcgcttctttgacgaaggcaatgttcgggcggttgacggaatgaatatgaaagtcaggatgctgtaatcttagcgtttgcactgtatcttttagcgtttgtttcgttgctgtagctgtaagagctaaagcaacaggatgacctaacgcttctctccattctcccagctttgaatattcaggacggaaatcatgcccccattctgatatacaatgcgcttcatcgacgacaaacagaccaatatgcatcgacttgagctgttctagcagcacttctgacattaatgcctcaggtgcgacgaataaaaatttatatgatggcaaatgccgaatgatatgtcgtctctcctgaaaagacaatgtgctgttaagcgccgccactcgtttttctccgcgcattttcattcgttcgacttgatcctccataagcgataaaagaggcgaaataatcagaactaatccttctgtcatataaccgggaatttgatagcaaagtgacttccctccgccagtaggcagcatggcaaccgtatctttttgatgcagtacactttgaataatgtcctcttgacccactttaaatgtgtcgtggccaaagtatcgcatgagcgtctgatgaagcttatccatttgctttcaccatccttgtcagtgccaatcgtatttgaaaataagtaaatggatgctcgagtttttctttaatcagcttcattttatttgtttgaagctccctggctacagtaaggatcgcgcgctgctcttctatactcacatacggatctattgaaaagcttggctcatgtatcgacagctccacgatatgatcttcgatcgttgccttttttagtgaacgaatgtgagcaatctgttcaatatcaaatcctttttggacaagctcaagtgttttatgggtagaagttgttaacacgcgtttgaattcaaggtcacctacgagctgctgcaaaatcggtgcctcacctttttgggcagattgaataaaataatggagtacattccaaaaaagcaggtacacataccacacatcttctttcatccactccgccatttgctgatacgtacgcccgattcgttcatttgaggtcaatgaataaacaaaaatcagtgcctcttgatcgcttaaacaaacaaggagcttttctagttcatgatgcagatcttctgaaagcttgcttttctgctgatgctgtttcaagaaagatttcgtccagctttgaaccgagacatctctttgtattggaacatattgatgcgatccagccatatagtgagaaagcacttgtacaagtaaagagagcctcatccatagcatctttgctttatcgtgatatttggcaccatgaaaataagcgggcatcggtttttcagaaaaatgctggtttagcattcgctgccctgcttcagtgatgctgaatgtctcatcgttttttctaatgtagtgcttctcttcaagctttaaagcagaacgattcagctgatccctcgtaaaccccgggtaacagccgaagtacctggaaagctcaaacaagctggcatcctgtatggtttgtgatgatttttttcctttaaaaagatggtagacagcactaatggagcgttcgccgttcaatttatatacgctgtccattaacatgacatccaaataatgaagagtcattcatcaaagcacctgtcttcctgacaaaattcgaatattttctccctttattttaacagatttcatacaagaagaaatgtttaaactcaatttatgggggaaagttatgaacaaacccttatgtgataagcattctcaatcactttacagttgaaatgtgaatttaaaatcattacaataaggtttgaggaaattgttttttatcggtgaaactaaaaaggttaaaccatgtgttccatcgaactatctgggaggtattttttaacatggcaaaatatacaattgtagacaaagacacatgtattgcttgcggcgcatgcggtgcagctgctccagacatttatgattatgatgatgaaggcattgcatttgttacgcttgacgacaaccaagggactgtagaagttccagaagtacttgaagaagatatgcttgatgcatttgaaggatgtccaactgactcaatcaaagttgcggacgaatctttcgagggtgacccacttaagcatgaatagtataaaagccccttatgcaggggctttttttatattaactattttgaagtcggcgtttattttcaaaccagggacgcattttcacaaaaatgaagctaaacacgatggtaatgatcattcctttaataaagttaaaaggtaagatccctgctgtaatggtcgtcttgagcgcatgatcagatagttcaggtgcgtttaaaaaccatgtgtaagctggcaggaataagaagtaatttaaaatgctcatcatcacagtcatcagtaatgtaccgatgatcattgaccatgccatcccttttgctgatttaatttttttgaacataaaggcgactggtaagatgaataatgtgcctgcaatgaagttcgcgacttgcccaactggaacaccagacatactgccttgaatgagataatgcagaacattttttaatgcctcaacggcaattcctgcacccggcccataaattaaaatcgcaataatggctggtatatcactgaaatcaattttcaaatacgctggaagccctgggaaagggaaatccaataaaattaacacgaacgaaatactgctgagcatactggtgacgactaaacgttttactttactttgattcaatattctctctccttttcgatcaaatctttcgaaaagaggattgttcaatttcagccgcaaaaaaaccgctcatgaaaacaggagcggggaatttaggctagacaaataaacgtgtgaaaaaccatgttttcaacgtttacgaacctccatcttctcccatccagactatactgtcggcttcggaatcacaccgaatcctgccaaaaaaggctcgcgggcttagagactatgctcatcaccgccggtagggaattgcaccctgccccgaagattgatcattattcaattcgacatcattatatatgatatatgagcatttgtacagataaaaatcctgagcaatttcatcagttttaagaaatcgtaaaaaccttaaaaattataatgacaaatgcgcaaaaattggttatcttttgtttaaaggtgtccattctttataaagataccaataaatgttcgtgttttctttttcgctttactgctttaatttgattgacacagtgaaaaggaatatggtaaattatcagatatttatgacgtttattttaggaggaaatcttacgatgtttcgagtattagtctcagataaaatgagcaatgatggtcttttaccacttttagaatcagattttgttgaaattgtccaaaaaaatgtaacagaagcagaagatgaattacacacatttgatgccttacttgtcagaagtgctacgaaagtgaccaaagagctttatgaaaaaatgtcttcattaaaaattgtcggccgtgccggtgtgggagtagacaatattgatattgatgaagcgaccaagcatggcgtcattgtcatcaatgcaccaaacggtaatacgatctccacagctgagcatacatttgccatgatctcttcgctcatgcgtcatattccacaagccaatatttctgtgaaatcaaaagaatggaacagaggcgcatatgttggtgctgagctttatggaaaatctcttgggattgttggacttggcagaatcggaagcgaaatcgcccagcgtgcaagagcatttggcatgacggtaaacgtatttgatccatttctcacaaaagaacgggcagaaaaaattggtgtcaatgccaagtcacttgatgaagtactcgaagtatcagatattatcactgtacataccccattaacaaaagaaacaagagggcttctcaataaagaaacaattgcaaaaacaaaaaaaggcgttcgcctagtgaactgtgcgcgcggcggtattattgacgagcgtgaccttcttgaagcgcttgaaagcggccatgttgcaggagctgcactcgatgtatttgaggtagaacctcctactgataatccgcttgtagaccatccgctcgtcattgcgactccgcatcttggcgcatcgacaaaggaagcacaattaaatgtagcggcgcaagtatctgaagaagtacttcaatttgcaaaaggactccctgtcatgtcatctattaatctaccagcgatgacaaaagacgagttcaaaaagattcagccttatcatcagtttgcaggaaagctcggacgtcttgtctctcaatcaatgagagaacctgtaaaagaagtaagcatctcttacgaaggctctatttcaaaactcgaaacctcctttattacaaaaagtctcctgtcaggctttttaaaagaacgcgtcgattcgactgtaaatgaagtaaatgctgggatggtggcaaaagaacgcggcattagctttagtgaaaaaatttcttccagcgaatctggttacgaaaacagcatttctattgaagtcaaaggtgacctttcaacctttactctaaaagcaacctacatcccgcatttaggagaacgcgttgtttccattaatggatttaatattgatttttatccagatggacaccttgtctacatccagcatacagatgcacctggtgtgattggaaaggttggacaaatattaggcgaccatgatgtcaacattgcgacaatgcaagtaggacgtaaagaaaaaggcggcgaagccatcatgatgctttctttcgacaagcatcttgaggacgaaattgtcaaagaattaaccgaagtgcaagatatactttctgtccgtctgatcgacctataaaaaataatgttaaacctcatgcatttgcatgaggtttattttgttgaaatcattaaacggtctcccgttcggatgagatgagtagtaagctcattgatttttttcaattgttccacagtcatctcgtgcgcctttgcaatcgaccaaagggtatctccttgtttaatgagatatgtatttttttcttgcccgtttacatgaagagccggctcttggaaacgatccatcgcaatgattgtgagtggatctaccgcatcttctttactgactgaccaattacccttgtgcacctcaaaatgcaaatgagtgcctctagaagcccctgtgttgccgataatgccaatcggctgccctgcttctacatggtcaccttttttaacaaaacgctcgtgtaaatgtgcatagacggtttcatatccatttggatgctggataaacacaacctctccatatgtagcagatacatacgaacgcgagaccacaccttcacttgcagcaaatatggattctccttcaggcgcagctatatctaatcccttgtgcgcgccacctcttgtcccaaacaaatccgtgacttctccttttatcggctccacccattcgcttgttttctgtgcatgagcaaaaggcgaaaagatcaacagcaaaaaacagctggcacatatgaagcaataccttttcatcagtgactccccttctttgaggttctttttatgacagcttagtatacagcaaggaagctattttctatacatcaaaaaagaacgcaatttcttgcgtcctttaacggtctcttataacaactggattcggcagagccggcacctctatgggttcttctaattcatatggaccaacttgatctgcccccgcctgttgaatggtgacctctgtaaaaccaaaatctttcgctgagagcagcagaccttcaatgagtagaatatgatcatttgagtccgataattgcgctgatgctccaaatgtgatagtcacatgttttcctttagtcgtcacttctttaatcgattcatctttaattaatggatcaagtccggcatcacttgtccgcttcatggcctctaccgcatcttcatacgaagaataatgggtttttgaaggcactaaaaaagtcccgcttttgttgtctaaaatataataagcgtgctttgtttgtttctcaatcgacattgttccaatgcggccatttgctcctaattgaagttgagaacctttggatgtcttgacctgtacctgcttatacttactccattttagcgtttcttttaccatatctttaaaccggttggcttcttttaacgtatcgagggacaaatcattttttaactgaaagatgagtgtatctcctttttctcgaagatctaccatatcaatataagattgaagaggttttgtcatttcaggcagctgcacctgctcatatgtgttcatcatttcctgcaaatgatcatactcatcctctttttcaatgctaattggaactacctgagaggttgattcatctatgtatgcaatggtcatatacttttgctgctgcttacgagaaacaacgtgtgagggcccatcagtctgtttgaccgcctctaatgtggcgttcacctgacttttgtcagcacttgtttccacttgcttatgatgatcttgagcagccggctgaaataaatgaggagaaatcaaaaacgccataaataaaaccacaacggttgcgaccgctggaccgatccatttggcacttttctttttctgcccgcttgccatcagcatctgctggtatatctgcttagatgaacggttgtcctccacctttggaagctgacttagtaacaccttgattcgttcttcgctccaatcggacctgttcgttttcattgactagctcctccttcaaaagctccatatgttttcggagcactttcaggcctcggtgctgcgttgttttgactttgctttccgagaactttagcgcctttgccgtctccatgattgagtagccctggataaatcttaaaatgatgacagctcgttgatcaatcgtgcaatgatcaagtgcggcatagatttcttttacattttcatcctgtacagccagttcgtctgggagcaagtctgggtcctttacatcctgcttatcccaatcaaacgtgccgagtacccgttgtctaatggtttgctgtttgcgaaaccaatcaatcgccacatgcctcgcaattgaaaacagccatgttttctcgctgcttcttccttcaaaagttttatatgagtgaagtacccggatgtaaacctcctgaacgagatcctctgcctgatttttatctttaaccatataaaataaaaactggtacaaatcttgatggtacgaatcatatattttttgaaaggtttcatgcataggaaacccctccgttcacttatttttgtcgattgactcttacaaaacgttacattacaactttatgacaaatatattacaagttcaacaatttgggaagggctttttgtttaacttctccttaaaaatatgaaaataaaaaaacacttctttttttagaaaagaagtgtttctcatgtaacaagattcttcgtcaggattagacgagttcctgcttttttctcggaatataaaaggtaaagtgtgtacctgtacccgctttgctatgtgcatgaatggagccttgatgcgcctctacgatgttcttcacaatcgcaagaccaagcccagtaccagaacgccctcttgttcttgccttatccgctttatagaaacgttcgaaaataaatggcagatcctcttccgggattccgcttcccgaatcttttacatccattttcagaccgctttccaccgattgaaccgagaagtgaacctctccgccctctggtgtatgacgaatggcgttatcaatgagattcgtaaacacctgctcaatcttatccggatcgagtacaaagtgcggttcatccacttgaatgtcatatgtgagatcaacttgtttttctttcgcaataccgagaaacttgcggtaaatcttctcggttaactcttctgtatctgtcgattcaagattaagtgtaatatggcccgcttccattctcgctagatctagaaggtcattcacaagacgtcccattcgaagtgattcgtcgtagataatttgcgcaatctctttcttttcctcttctgagcctgcaatatcatctacaatcgcctcactatacccttgaagcatggcaattggtgtacgaagttcatgactgacattggcaatgaagtcttttctcagcttatcaagtcttcgttcctctgtcatatcacgaaggaccgcaactgctcccctgacatcctgctgattataaagcggagacatgagaagaacccaagtacgtccttgcagcgtgacttcgatcatttgctctttttctgtgctgacggctgtatgaaacagttctctcgcttctggtggcagttcatctccatctttgatcttcatattttgctcgtaataccatgcctgcaagaatcgttctgcaggaggattcgtcatgagaatcgttccatcaatattgatggtgatgacaccatcggccatactgcttaaaatgttggacaaatgttctttttcttgatttaaggctgtgatatggaatttaagctgcttgcccatttgattaaaggcgatggccaattctccaatttcgtcttgcgttaatataggaatctttgtatcaaatttccccttcgccaaatcctgtgctccctctctcatctttctgagaggataggtgacacgtgttgataagaagaaagcgaagatagtggtcagaacaatggcaattccggctgctaagaagatataacgcgtcgtatgtttcgttgtttgttctacagcgagtaatgattgagaaagaaagaccatgcctttttttccgtttgcctcaaatggaacaccgacgacaattcgttcatctttctgattgcctgcatttggttctgcacgtttactgatttttttacgatcttttagtgcttgatttaaatcactgtccgcttcaatttgtttctttgtaatcgcaggaagcttcccgtctttttcagacgaataccactctagcccgtcctcttggataatcgcaatactcgtcaatttgtcagcaagctctgatgtaatcgaccttgcgagcgattgatcctcatggctttctaaaatgaccgctactttgtttgccatttgagttaaatctgactttgcttcttctacatggtaattctcaatgaactctaaaagaagcacggttaaaatagataaaacgatcaggacgaggaagagaatggttaaccatagctttccaacgacacttttccacagtttcattcagcgccgacctcaaatttgtacccgacaccccataccgtcacgatttttttcgcagcttctggtgacactttattcagcttttcgcgaagtcgtttgacgtgggtatcgactgttctcaagtctccaaagaattcatactgccatacttcttttaacagcttctctctgtcataaaccttatccggtgttttcgcaaggaaatataaaagctcatattccttcggcgtgagactgacttctttgccatcagccgtcactctatgcgcatcgtggtcaattgaaagatgagaaaacacaagtacatcttttgttgttgtcccagtattgagataagacgtttgagaagatcttctgagcaatgccttcacacgtaaaacaacttcacgcgggctaaaaggttttacgatatagtcatccgttcctgcctcaaacccttggacgcggttggcttcttctccttttgccgtcagcataatgattggagtcgcttttttgtctcgaatttgattacacacttcgattccatctgtcccaggcatcattaaatcgagtaaaatgaggtcataatctgtttggagtcctttttgaatcgcctcatctccattttctgcttcatcgatttcataattttcacgttctaaatacatttttaaaaggcggcgaattcttgcctcatcatctacgactaatattttcgtttgagttgtgtgttccattagacaatcctcctgctttctccgttgttacattcattttaacaaaaagccgaatcgattcataaaagttggcctttttcatgtgattacgcgtaagaatgaagccctgcaatcacaagattgacaaagatgagattaaacataatgatggcgaatccgatgacagctaaccaagcggacttttcgccatgccagccccttgataagcgaagatgaaggtaggctgcataaaagagaaacgtaatcaatgcccatacttccttcgggtcccagccccagaaccgagtccaggcaatttgcgcccagatcattgcaaaaatcagcccgcctaacgcaaatacagggaaaccaatggaaacagccctgtatccaatttcatcgactaaatctaggttcacctgcttcacaagcggttgaagcagagcgctgagtcgtttgcgaatgatcaaccgaatcagtccatacaagatcagccccgtgccgaatgaccataacaccgtattgacctttcttcctgaaaaaacaggcggcaaatcaacaaatggttccaaacgatcttgcgtcacaagctctcctttatgaggtccaactagagctggcagctcatagaccatcacactttcctctttatttttatcgacccaattaaatttcgcctcgtatcctgtcattctaaagatggacgtgacagcgataaatgcaagtgtgacgacaatcataaacatgacgagctctaaaccaaatgtcttcttccctggctttgtttggtcgacatgctttaataagaagatgacacctgccacaaagctgatcgctaaaatggcttgcccaagtgctgctgttgtcacgtgaatataaagccaattactttgtagtgaaggaatcagcggtgaaatatctgatgggaacatacttgcataggcaataatcaataaagcgattggaagtgtaaataaaccaagtacagacacttgatacacaaaatataaaatgatgaatgcgagcacaagcatcatgccaaaagcggttgtgaattcaaacaaattactgactggtgcatgaccagacgccatccatcttgaaataaaatagccaaattgacttaaaaaaccgatgatggtgagcgtaatgccgataagtgccgccttattcctgcgcggtccatcaactttcttttttcctttaatggcaccaccaaaaaaaggaactgccgctaaatacaatagaaaagctgcaaataacaggttttcactgactgctgccatctaatccttcccccttgcttttgctgatacttgttgtatcaggcagttctttttgatcaactggctgtttgatgccactgtcacttagtaacacgttgagatcagactttaagccgaaccagtttttgtttgtgtgtcctgccacaaatacttttccatcctttgcagacagccaaattcttctatgctgccaatacatcccctgcacgacaccaatcatgaagataatcccgcctacgatgagcaccccgagagttaaatcttttctaaccgtcaatcccgtgacgtttttcgtttccactcgatcaaacttcatcttatatatgttgttatcagagccttctactgtctcttgaatcgccacaaaacttttttcacctttaggcttttcaggagaaatcatttcaaacacgaaagcaggattatttggattccttgttttcgtactcggcgttccatcatcgtcaaaataaaaatcagggagatagctcatcactttgactttgtaaccgctaccaagatcatattctgacttaggctccagcagattaatcttcactgttccgaaagatttttctgtatctttacgaatcagctgaaagaccatttgatcgagttcattttgtttaaaatccacttgatataatgagaaatgatcaaacttgagcggttcgttcactttgatatcgtgttctgttacctgcttcagcttgggcttttcaccaaaaacaacttccccttcacgtttgtataaagtggcatcggttttataacttttcaccacttgaccgtcgccagctctttcaatcgcattctcaaacacttctttttcatttccagtttcatagcggtcaattgaaaacgcattatttttcaaaaaatattgaccatctgtgcctggaattggagcagtttcaccttctctgacccagagcgtttcatccacatacatgcctgggacaaacctgagcatcgatccaatgagaaagatgattaatccaatgtgattgacgtaaggcccccagcgtgaaaagcggcctttttcagctaaaatatgtccgttttcttctcgcacgcggtaacgcttttgtttcattgctcttatgatgccttcatatgtatgctgatctaacgttttgtctgtttcactgaacagacgctgtcttctcataaagccttcttttttgataaccccttggtttttaagtgcccgataaagaggaatgacccggtcgagactgcaaatgacaagggagattccgattgatgcgactaaagctaaaaaccaccaagaattataaagatcatggaatccaagtatgtaatacagcttaccaaacgacccatattgctcttcataataggtggaagcagatgcacctggcggaataaaccgctcctgcggaaaaatggttcctagtgaggaagcaagcagtgtaataacaatcagccacacacccactttaacggaagaaaaaaagttccatactttatccacaatcgttttgttgtatgtttgcgagcgtcttgcactgccgtcatatctcatatcaagcagctttgaagagtttttctctatagctgcaattggattcccgcatgattcacataaaacagtaccgattggattaatatgtccacactcgcactttacctctttcattctatgacccctttggtttaatcaaattcatatattcatagacattacgttctgtcatggttccctttatgactttgattaccttgccttcaggattaattaaaaatgtggttggcagcggcgtaatatcatatgcctctgtcacttgacgatctttgtccatcgcaacaggaaaattcacgccataggtttccataaaatttttcacggcaatattggattccccaacattgactgcaacaatttccacaccgcgatccttgaatacttcatattgatttgccatgtaaggaaattcttgtttacacggaccacaccaggtcccccaaaaattaaggaagacgcctttgccttttaattcctttaattcaatccgttccccatccactgattgaaggacaaagtttggcgcaatagatccttctttgacttgatcctgtttggcaaatactgagttatacatcgtataacaaagtgcagcaagcatcacgaggagaatgcccgtccgtatgaaaaaccgtcttttcttcatctgaagtaccccttccccatagacattcaggtaaattatagcattctccttcttttgatgcttcttcattttttgaagtttatgtgaaaattaaaaagcgcttttcccatgatctgcaatcgctcttaggcgcttgacttcatgcggagacaattctctgcggtctcctggtctcatgccttcaatatgaaggaacgcatattgctctctttttagctttaacacatcatgaccgatcgcttcaaacatgcggcgcacttgtctgtttctgccttcatgaatggttaattgaacgatagatgtctgctttcgtttatcgatagaaagcattttggcacgagcacgtgctgtctttttatgatctaacatgatccctttttctagctttctaagcaattcctttgatgggatgccttttagcttcgctgcatacgttttatcaatttcatatttcggatgcatgagcttatgggcaaattccccgtcatttgtaattaaaatcaaaccgctcgtatcataatctaagcggccgattggataaaggcgctgcgggacgtcatcaaagaaatctgtgacgaccttacgtcctttatcatcctcagcagctgaaatgacgccgcgaggtttataaagcataaagtaaaccggttcttctctttcaagctttaatccgttgacttcaattttatctgaagagcccacttttactccgagctctgtcactgtttgaccattaacggtaactcgtccttctttaattaattcttctgcctttcgtctagaagcgacgccggcatgtgcaattactttctgtaaacgttccatttgtctttcacctcatgtactatcttacttgcttgacttaaaacaaacaagcattcgtggaaaaataagcgattcgtctgtctaatttcagctaaaaagcgattttccatccacgaaatacaaaaaagcgcctcattaggcgccgctaaataacaaactgacgatgatgacagatgctatgattccaatgaggtccgctaacagacctactttcagcgcatctcccatttttttaataccgactgctccaaaatagaccgttaaaatgtaaagagtggtatctgttgacccttgcatgacagctgcgagctgtccgataaaagaatctggtccatatgtcgcaatgaggtctgatgtcatcccgagtgcggccgtgccagatatcggacgaataaacgcaagcggcaccacttctgccgggaagccgatcgctgtaaacacaggttttaacagtcccatgacaaagtcaagcgcaccagacgcacggaatatcgtaatggccacaagcatgccgactaaataaggaatgattgaaaaggcaatttgaatgccctctttcccgccctcgacaaatgtttcataggtcggtacctttttaatggttcctgcaattaaaattcctgcgatgatcagtgggatcaaagcaagtgacagccagttaataaatgacacgagatcacccccgcctgcttctgcgatagtggaaatagcgatcaatgagaattgcaccgattcctgaaatgagtgttgccaaaatggttgggcctacaatgtctgttggctgatctgcaccataggtcattctaatcgcaatgacggttgttggcacaagtgtgatagaggatgtgttgaccgctaaaaatgtaatcatggaccggcttgcttcatttttcccctcgtttaatgctttcatctgctccattgccttaatcccaagcggtgttgcggcattcccgagaccaaagaaattcgccataaggttggacaaaatataccccattgcgggatggttaggcggaatatccggaaatagctttgaaataaagggacggcacaatttactaaagaaatttaacaaacctgcctcttctgcaatcttcatcagtccgagccaaaaaacgaggacactaatcagaccaattgaaatggtaactgcttcttttgagcccttaaatacagcttcgtttacttcctccatcgttccgttgaacatcgcatacacaagaccgatgacagtgaggaatacccaaattagattgaccatgaagatccgcctatagatgtctgaaagacagacttaaacatttcttgaaagcttttttgaggcattcgatttcgtttattttcataaaaaatcggaacttgctcgatcacctggccatctaataaaaatgtcattttccctacaacatccggaatggcttcggcgtttttttcccacttcttttgaggggtaagcatttccgtttcaatttccactagctttttctcatcttcatttaaaaaatagtccacatcacgcttgataaatgcttttttttcgtaaaaggttccttttaacgaagcgagtcttcctttttcagcaagtacgtacgttttatagtgatcaaatgcatattcaaacatagagatatgatccttccaatcatctggagcattaatggtcacagcgatcagcgccgcatccccttttgcagctgtagagacaagtgtgcgttttgcaagcttcgtatatcccgttttccccccagttgaatattgatataaaccagtgaggagcttgtttttatttttccaatagccttccatcgttttcgctttatagaaagtcgtgcccgcaattttttgatattgtttatgctccatggcatattttgttaaaatggccatgtcataggctgatgaataatgatgtttatgatcatcgagtccatgcggattttgaaaatttgtattctccattcctagttcagacgctttttgattcatcataaaaataaatccttctaagctgccgcccacatgctctgcaatggcaacagctgcatcatttccagaacgcagcataagcccgtacgtcaagtcttctaaactcaccttctgcccttcttttaaatagagcgatgagccctctgcttgaatcgcgcgttttgataccttgacggtgtctttcatttttcctgattcaatggctaataccgccgtcataattttcgtaatactggcgattctccttttttcatgctcgtcctttccaaataggactctgcctgactgtccatctattaaaatggcgcttcttgcactcacagataatgatatgtctgctttggcatgtgaggaaaaaggcagtaagagtgtaaatagaagaaggactgctgttccaatttttaaatagggcatgttcattcacgtccttgtccgttttgtacaagtgtatgcgcgccttaaaaagttatgatgcctcgtccataaaaaaaagcgtctctatatgtagagacactttttcctcttgctataccattttcatttgctgatgagatgtcgtatattctagctcttctctcatcgctaaaaaatcgttttctaatgaagaaaataatcgtttcatatcagcggatacttcatggtggaaaacaatgctgccctttcctgtatacgcggaacggctgtcttcataccatgtatcctttttcggcgtaaaaaattcttcaatacattgatgataaatacggtgaagcgtctgctgcgcggcttgctgagggaatgtctgctgctggctgattttcctgcaaactgccgctgcatcctcgctgtacactgcaagcttccgtaatgtactcaatatgtcacaataataggcttccgcttcagggtttaatcgtttcatgcttgataaggtagcttcgttcagaaaaccattcatttcagttgcaacctttgataaaaagacgcctgcttgatcaacttgagcctttacattcatatgtgccatttgtttcgtgtttaccttcccctcatggctttattaccattttatctgacatcaatagatgttagacctaaaatcttttttatattttatcatacatttttaattcttttgaactattttatctcttcgaatgtttgattgaagttttcaaaaaaaagatcagcctcttcttgtacaccatctgcttccacattctctggcagcggaggtaattcatccaaggcttttaagccaaactgctctaaaaaggtaggtgttgtcccataaagaatcgctcgccccgggccatcggcacgtcctacttcacagagcagtgctttggctactaaactatgaagcacccgctctgatttgactcctctgatctcctctacctcactgcgtgtgatcggctgtttataagaaacgattgcgagtacctcaagcgctgcctgtgacaaacctttggatggggtctcgactaattttttcaaataaatgctgtattcttttttcgtcagcagcatatatgaatctgcatattcaatgagctcaatccctcgttcttgtttttgatattcttcctttacggcagacatcatgtcgagtaatgctgcctcttctacttcaagaacagacatgagctgtttttttgttaagccttcgtcacctgctgcatacagcagcgcttctatgatggctttccaattcacgatatcaagcgtcatgaatcgtttcactccctattatataaatgtcttcaaagtttccttcctgctctaacatgatttgatgacttttcatcaattcgagaacagcaagaaacgtcacgacaaggtgctccttttgatcatgttgaaatagagtcatgaaattggtccgctttttcgtttttcttaaatggttcataatctcattcattttgtcttcaatcgggatttcttgtcttgtaatcttagatggtgctggtttcgttattttttttcggttcaataccttttggaacgcacctaacatatcatacaccgtgacatgtaagtttgtgtccttcacttccgattcttttgcaaattcgcttaaatcactcggaggttttgtaaaggcattttgcctttcttcctcgcgttcctttagttcttgtgctgcatttttatacttgcggtattcaatcaatttgccaatcagctcttctcgagggtcctcttcctcttcgagcaggtcttcatcaaatagctcttcctcttgtttcggaaggagcattctgcttttaatactcaggagggttgcagccatcaccaaatattcacttgccacatcaagttcaagctccctcattgtgtggacatataataaatactgctccgtaattttagcaacgggaatatcataaatatcgatttccaaccggttgattaaatgtaaaagtaagtccaaaggaccttcaaacgaatctattttcacctgatattccagcatttttttctcaccatttctactgtcttctaagtaccgtttcaccggctaacctttagtataagacaggataaagctctcgtccaatataatttcgaccatgatgtcctaggcaaaacaagaaaaacagtggttccgcccataccactcagggcatttatacatagaataccattgtaaaacagaactgatgaaaaaggaggccgtatcattatgggagatggctataactttagcggaggtttcgcgcttattgtcgtgcttttcatcttgctgatcatcgttggcgcggcttgggtttattaaagaaacagagcgtccttttcacgaagggcgctctttcttcttttcttttcaatatgttagactgagagtggaaaaggagatgaccactgtgtatcctgaagcgtacgtggcttttttacatgaatttcatacgacaagagattattttgagtgtcatgaaattcttgaggaatattggaaggaagacccgcctgagcagcgcaaagaatattgggttggtttcattcagcttgccgttgctttgtatcatcaaagacggggaaatggaaaaggggcaaaacggctcatttcaaacagcctccacttgctggaagcaaaccggcccgtattagcgaacctcggtctagatgatgaggcgtttctcatacttctgagaacgctaaagaagaaaatgaatgaagacatgccctacgaaagtgtgttgctcccgatcaaagatcaagcgcttctttctttatgccaagaaatggctcaaaaagaaggactgacctttggacaggagagcaacttatcccacacatttttgatcgaaaaacatagactgcgtgaccggacagatgtattgcttgaacgaaaaaagcagatcgaacgtaaaaaaagcagaggactgtagcctctgcttttacatgtgtgatatttaatttgtttcgctgtgacacttatgaaagaagccttgcgttaattcatttggaatgagtgttttggttttgaatacctcttccacggctaaaaccatttccttgccgattccttgatctcgatgggatggattcacactaatatgctcgatttgtacttggtcgtctgttttcaacacaccaatggcacctacgatatcctcgccatctttccaaaggaacagctgccgattttcatccatttcatatgacttcatcgtctgctgaagctgtttgacgtctttctcacccggcatgaaggagagtagccccatggcaattttttcaaaagacctcttataacgaattaacatatatacccctcaatattcaaattatcctaatgtccagcaaatgtctcacgaatcatttgctcatcacacattataaacatttttataccgtttttaaactctttttcactaaattaacgaaaggttcgattgagattcgccatttcaatggcagctgcagccgattcgctgcctttatttccagcttttgtgccggctctttcgatggcttgttcaatggattctgttgttagtacaccaaagataatcggtactcctgttgacatggcactttgagcaattcctttagcggcttcattacaaacataatcgtagtgagttgttgcgccccggattacggttcctagtgtaatgacggcatcgtatttctttgtttcagctagtttttttgccatgtacggaatttcaaaagcacccggtacccacacgacatcaatatcgtcaccgtttgctccgtgtctgagcaatgtatcttctgctccgtcaagcagtttacttgtaataaagtcattaaatctcgcgacgacgattgcaaattttagtccttctgctactacatgcccttgtattgtattcatatgttgatcatccttttttgtgatttttattttgtttcgatagttgctgtttcgttattgtttaaataggtctgcaatgcttcgattgtcagcatctttaaaccgtgctgtttttggatctcttttagttcggggacgcgcgccattgtgccatctacattcataatttcacatatgacacctgctggctctgaacctgccagtttcgcaagatctaccgccgcctctgtatgacctggtctttctagtacaccgccctcttttgcaatgagcggaaacacatgacctgggcgggcaaattcttctggtgttgcgtctttatttaacatggcaagcatggtcgcagagcgctcaaaagcactaataccagtcgtcgttgtcacatgatcaatgctcactgtaaacgctgtatggtgtgcatctgtattttgttctaccattggatgcaggttcaggtgtttggcgatcgacgtatggaccggtgtacaaatgaggcctcttccatgtaaagccataaagttaataacttcaggcgtggcatgctcagcaagtgccacaaaatctccttcattctctctgtcttcatcatccactacgataatgatttctccttgcttaagagcatttactgcttcttctactgaatgatacatacaatcgcctcctagaatccgtgctcttttaaaaatgatggggtcaatcgggatggctgcttttcaccttgttcttttgttaaaaagcgataaatgtatttgccgatcatgtcacactctatattcacaatctctcccatagatttagtcgggaaaatagttccttcaagcgtatgaggaataatagagactgtgacgtgtgaatcttgcaaatcgaaaatggttaagctgacaccatctattgcgatcgaacccttttgcgtgagcatatctgtgagggtcttgtccatctccaaatcatagtaaatggcattacttttcttttctattcgggtaatgactgccgttccgtcaacatggcctgagacaaaatggccgccgaatcgtccattcgaggacatggcccgctctaaattcactggactgcctgatgtcagctgatccagtgatgtcgctttgaccgtctctggcatcacatctgctgcgaactgtgcttttgtaaagcttgtgactgtaagacatacaccattgatcgcaatactgtctccaaggtgaacatcttctagcacacggctgcacttaatgacaatttccatggcatctgctgactttttacttaatgactgtacggtgccaacttcttcaattatccccgtaaacatgtgatcctccctttcttttcatttgtatttctcactttataaaaaagcgatgttagggacatgtgatcgattgagcaccttcgtcgctttttaaggtccatacaaggtagatgagggatcacctaataaacactgcatgccggtctattaactacatgtacatacagaaagccccggaaaaaattccggggctttggcttttttgcatcagaaataaaactatgatcaacaaatatttttcgttcatagctttctttatccttctcccatccagactttcactgtcggcttcagcttttcactgaatcaaccgttaataaattaacgggtcacgggctgtaaagcatttgctttattaccgtcggtcgggattttcaccctgccccgaaggatacaatcgatatttagctgtccttaggggctattatagcgatccttgttgtcaaatgcaacaatcaagatttctcacaaaaaaagtctccttataggaaaggagacttgttaattaacgacttttactacttttataagtccatctattcttttttcattactaaagtaggctttaatacgatcgcctttcttcaagtcggccacatcatcttcgaatttctttccattaaaaatgatttttgtgccgttttttgcttgaccgtaatattcatctccatcaattttcgtaatggtatattcatagatggtataatctttatcattatttgttaagctttcaccaatggctgttggcacatcttcaattttcatgccattcatgtataaataacctgcgcctaaacaaagcagtaaaacaaataagacggcaattttcaatttaattttccccatatttagaacctccatcatctgcacttcgcctatttgtatgttttattccttcttttgatgaaataaaaccaaaaaagctgatttccattaatggttacttatataacgattgagttggacctttggttccaccttttcatcattacatatgatacgaatatgcgttctttattaagggggtctctttcctctttatccgttagtagggcgcacaccattgatgatcatcttttttcgagtgcgaatagatcttcctctaacaattgcgatctctgaacagcaatgttccggctgtcacgaaccccttgattataatagtaacttccaagattttttgtgataaattctagtatattaatggctgctaattcaccaatctcttcttctcgttcttcggcaaagtaacgctgaatggcaatcatcatttgatttttttcttcttttgttaatggtttcaaattatctcctgctttctttcagcatgaaacacgcttttttaatttgcactgacatccgtttttcagttgaatgtggcgacacccacaaatgcgaatatttgttctcttatcatatcacaaaatcgagttctgtccataactgtcctaaaagaaaaagcgtgttttgatagcttgatcaaaatacgctttccctatattgactgttttccacgtagactgtttatttcaatatggaaagtatcgtcgctacagaatgatctacaaatgaacgctctggacgagatttcatgaggacggtaagtccaatgaaagaaacgaccagtgtctgtgctaaagctttagcattcagactgctttcgagctcacccgagcgaataccttgaacaatcctttcttcaaaaatgaccgaaagatacatctgatgctctcttgtaagaatttcaaatttctcttcgtgtggcgcaagttccactattgtattgatgcaaaaacatcctttactcggaccatctctatattcctcttctactaaatctgcaaataatgcatgaaatgcttcctttgcagaaagattgctttgaagttttgttcgaatatggccagcatgctgctttgtatatttgcgtaatgcggcctcaaataattcctctttatctccaaaagctgagtataagcttggccgctgtattcccatttttgcagtcaaatcgcttaatgtagtggccctataccccttttcccaaaaaagcaccattgcctcatccaacgctttttccttatcaaattcccgttgtcgaaccatcagcaattcctcatttcaacaataaaatttcttcacaaagtcagccatctatttcttgatattattctctatttggttaccaatcggtacattataattttattttattgacgtactaatgtcaaattgccttaccctctcaagatcagcatcaattaactgtatctaattcttgactttaaaacgttttgttggttatccttaacaggaatcataatataccgaccagtatattatactttttagtacaaaaggagacgatgaaatgcatggtgaaagaaaaaatcatttccattgaacatcttgatatggaaacgactcatttaccaatcaaaccgagatcaacgatgactcgctatatggcactgctgtttgcgatagcctgcgggatggcagttgcaaacatatactttgcacaaccgttattagactccctcgcatccgagtttggtatcacctattcatccattggcatggtcattacgattactcagctttgttatgcgctgggactgctactgatagcaccacttggtgatctattgaatagacgccggctcatcattggtcagatgcttttatccgtgttgtctctcattctagtcggcatcgctcctatcgtcaccgtcctctttataggattagctgtggtcggactgcttgctgtggtcactcaagtactcgtagcgttcgcagcgacttgggccgctccagaagagcgcggtcgtattgttggcttggtgcaaagtggaatcgtgatcgggattcttctcgcacgaacgtttgctggtgtactaaccgatctcgccggctggaggtcagtctacctagtttctgccattatgatgcttatcataactggcgtgttgttccgaattctcccgggtgatgacagcgaaagagagtcattatcctatgcaaacctgcttcgttcaatgtttacattgttcagacaagaacgaatcctgcgcatccgtggaattctggctcttcttatttttattgtgtttggtacgttatggacttcgctcgtgctgcccctcagtaccacgccattctctctttcacatactgctattggcgcatttggccttgctggagtagccggagcattaggtgctgctcgggctgggagtcttgctgatcgaggtttaggacagttcacaacctgcattgcccttgtcctattgctcgtttcatggtttttcatcggtttggttaagcattcacttattgcattagtcattggtattatcattcttgacctatctgtgcaggccgtacacgtgaccaatcagagtatgattttcactgtgcggcctgaggcgagaagccggcttactgctgcttatatgattttttactccatcggcagtgcgactggttctattgtttcaaccagcatctacgcaaacgatggctggatcggggtatgtttatttggtgcctctgtcagtgccattgcccttttgtattggatcatcacctaccgcctcacggaacaaataaccgtaaaatcagatttaacataaaaaaacaccgcgattaagcggtgttttggattaagcatcgacaacttcgactttttccataccttggccttgttccatatctagaacagcctcgataccagatgttactttgccaaaaacagtgtgaacaccgtttaaatgcggctgagggtcatgtacgataaagaattggctgccgcctgtatctttaccagcatgcgccattgataatgaacctctttcgtgttgatgtggattcccttctgtttcacatttaattgtgtaaccaggaccaccagttccattaccgtttggatcgccgccttggcttacgaagcctgggatgacgcggtggaatttcaatccatcgtagaagccttcactcgctaatttttcaaagtttgctactgtacctggagcagcttctgggtatagttcaaactcaattttcttaccattcgttagttgtatgtatccttttttcgccatttttcacattctcctttcaggttaaacaacgctcattatagcacattttcggtgatgttaaacatcccctgctctttgattgtgatttacctcttttcttaggattgatacaatagaagagcttgatccttttttcctattaaattgatgacagactgtgcaacatgtcttcattatattggaaaaggaaaacatcttaaaaagaaaattgaaacgtcgaatcgatttgttacgtctatatgatggagtgcatttctttacgtgtgctcaaaagatgagtttctcttgaaagaggaaccctttcgacttgaaggaggtcaacatgtttaaaaaatcaatgcttggtatgatggcagcgctccttttcctaattggtgcgccaaaagtcagcttagcggatgcagctgtcggcgatgtcatcgtcacacttgggcaagacttaactccggctgatcgccagaaggtgcttgacgagttgaatccacctgaaaatgcgacaaaaattgaagtaaccaataaagaagagcatgaatatttaggaaagtatatccctcgttcttctatcgggacgagagcattatcatcttcatctatcaccattgaaaaatcaggtactggtctgactgtggatacacataacatcaagaccattacagatgagatgtatttaaatgctttaatgacagccggtgtcaaggatgccaaggttgtcgtgactgcgccgtttgaagtttctggtacagccgcactgacgggtctattaaaagcctatgaagtgtcaagcgacaaagccattccagaagatgtgaaacaggtagcaaacgaagagcttgtgacaacttctaaattgggtgactccatcgggaaagacaatgcttctgcccttattgcaaaaatcaaggatgacattgcgaaaaatggtgtccctaaaacaacaaaagaagtcgaagaaaaagtggatcaggctgcttctgatttaaacttaaatctaacgcaagatcaaaaggatcagcttgtttcactattcgataaaatgaagaacatcaatatcgattggagccaagtaggatctcaaatcgataaagcaaaagacaagattacgaaattcatagaatcagatgaagggaaaaaccttcttcaaaagatttgggatttctttgtctccatttggaacgcaatcgtctctgtatttactggaggaaaataagtcatcataaaaagctgcctgtacatcaggcagcttttttacgtagatgatttcacttttgattgatacggtaaatcaagtttgacaatatcagcatatgtttcgcgttcaacgacaagctgcgcttccccgtcttctacaaatacaacagccgggcgcgggatgcggttatagttgtttgacatactgtagccgtaagctccggtacaaaagacagctaataaatctccttgtgataactctggcaaatcgatatcccaaatgagcatatctccgctttcacagcatttccctgcaatggaaaccgtttgatcatgcgtttggctcattttgttggcacttgccgcttcatatttcgcttgatataaagctggacgaatgttgtcactcattcccccatctaccgcaacataatcgcgaatgccaggtacatgttttgatgagccgatcgtataaagcgttgtccctgcatctccaacgagagagcggcctggctcaatccaaatttccggcatatcaaactcatagcgggctacgttctcttttacagcttggataattttctcgacgtattctgtcgcaggaagtggttcatcttcttctgtataacggataccaaagccgccgcctaagtttaacacggtcgaaataaaaccaaatgattctctccattcatctagcttcaaaaagattttatctgctgcaaggacaaaaccagccgtatcaaaaatttgtgaaccgatatggcaatgaacgcctaaaagctcgatcacttctgatccaagcacttgtttcaccgcttcatctgcttgtccattgtgaaggtcaaagccaaatttggaatcctcttggcctgttgtaatgtaatcatgtgtatgcgcttcgacacctggtgtaatacggagcagcactttcacctgttttgacagctcttgaccaagctcttcaatgagcttcatttcgtagaaattatctacgacaatacagccgatctcgtgctctaacgccattttcaattcttccctgcttttattgttgccatggaaatgaattttttctaccggaaacccggcgcaaatggctgtgtgaagctcccctcctgatacgacatcaagagataatccttcttccttggcaagctgaaacatggcgatggaggaaaatgctttactcgcatatgctacctgcgctgttaactcttcttctataaatgctttttgaaagctttttgcacgctcccgtattaaagccacatcatatacataaagtggtgtcccatacgtttcagctaaagaaacggcatcaacaccaccaatttctaaatgaccgagttcattttgtctgcaagtgccgtgtaaatacaatgtcattccctctttctccgcctcggctgaaaaaagacagctgcgtgagctgccttttgccgtttctcaaagttaaaaatacaatatcacaatcttcagccactttcaatgagcgttaagaatttggcggaatttttgatctgttttgagggtgaacgatgcttggccttacttttgagccaggaacagacgtccgaattaacacttgccataaagctttcccattaaaaggaagaaacggccacatataaggcgtctgcaatgaacgtatggatgttaaatatatgattaacaacgtaaaaccaatgatgagtccattcagcttaaagatcgccacgagtgctagtatgatgagtcgtacaatcttattggcgacactcagctcatagcttggcgttgtaaatgtcccgatagccgctagtgagacgtataagatgacctctggcgtaaataaaccgacatcaatggcgatttgtccaattaaaacagccgcaatcagccccatggcggtcgacaaagcggttggcgtatgaatcgctgccatccttaaaaattccaccccaaaatcagcaaggaatacttgtaatatgaccggtatatgagaaggtttattaaagccaatatagcttaaatgatccggcagaagacttggttcgaggataaacagaaaccaaatcggtaaaagaaacgttgaacataaaatgcctaaaaagcgtacccatcttaggaacgtaccaactgcaggtgcctggcggtattcttctgcgtgctgaacgtggtgaaaaatggtggttggcgtaatgatgacactaggagatgtatccgtaatgatgatgacatgaccttctagtatatggttagcggcgacatctggacgctcggtgtagcgtacaaggggaaagggattgtatccttgtttaataatgaattcttcaatcgttttatcagacatcgtcagcccatcgactttgattcctgatacttctttctctataatatcgacaagatctgggtccgcaatatcttcaatgtagcaaacacatacatccgctttcgaacgttcgcctactttgagcattttgtatctcagtttttcatctcgcacccgtcttcgtatgagcgctgtattgacaataatgttttcaacaaagccgtctcttgcgccccggacaaccttttctgtatccggctcctctggcattctgccaggatagcttctgacatcaatgataaatgcgtagttttcaccttctactacaactgccacaagccccgacagtacttggtctaccgcttcatcgagcgtttcaacctttgagacctgctgattgactagacggttctcgaccacacgtgccagatcatctgattcaggttcgttgtcattgatttcaattagctcttttaataagtagatgacatactgtgtatcacacagtccgtttacatagtaaagttggatttcctgatcgtgtatataaattttccgcacgccaaggtcaaagctgagacccattccgacattttccttgaagtaatcttcatttttcttcgggtctcggtacacgtttaccttgtctttcttcatggaaaccactcctttctaaaattaattcaactgctttcattgtgatcggagatcccttgctcagatcatctttacgtcccattttgccaatatctccaatcccaacaacaaacggaagatggagcgagtcaagacaatacactgtatccccgctcattttatgaggctccatttcaggaagaccatgcttgtcgacaccgtattctgtcagttcaccctcccggtcaatggaaacatgaacttttgtccattcagcttgatgcgttttggatgcaacggcgatcgctcctatgacttcaatttcagggtgacgcgccacatgcttcatcgctgtctctcctgttccttcacctgtcaggccagagtcatcaaacatgacaaacactggatcatacggcgtttttaaaatcatctgtacaagttcaggccctgtccgtttgcttggatttccttttgagctggaaatacatcgtccaccgacttttttagcagcaagctcaatggttttggcagcatatatatctccgtctgtcactaaaatgactttccgtctttgccccatattaggttatcctttcggtttaaagataagagcgataataaatgagaataaaatcgcagctgatattccagcagaagttaattcaaaaataccgatcccgattccgatgaacccgtgtacatctgcctgatgcatcgccccatgaagcaagctatgaccaaagctgacgattggtacggttgcgcccgcaccagcaaattcaataaatttatcataaataccgaaaccgtctaatatggtacccgccacaacaaaggtggtcatgacatgtgcaggcgtaagtttgagtacgtctagtaaaagctggccaatgacgcaaataagtccgcctgcaacaaaagcgataagataatccattagctctctcctcctgcacgctcaaatacgacaccgtgcgcaatggttggaatggtctctttttgctggaccatcgtcgggctgagaagtgccccggttgcgacaaccagtactctttgcaaattccctgccttcatttcttgaaagatgtgactgaatgtcacaatagctgaacaagcacacccgctgcctccagcgaacacgttttgatcgggtgtatagatgattaatccgcaatcatcgtgctttcggccgagctgaatgccgtcttctttgagcagatcctttaagatcggtgagccaatgccagatagatcacctgttaaaataagatcgtaatcgtcaaccgttctctctagatcttctaagtgctgcttgatggtatctgctgctgccggtgccattgcggaccccatgtcaaatggatctgtaatcccaagatccataactcgtcccacagttgcgcttgtaatttgaatttgggagggctcttggctgataataacggccccgctcccagtcactgtacttgtcgctgtatctggtttttgtccgccgtattctgtcggattacgaaattggcgttctgccgtcgcattatgactgcttgtcgcagcaatggctctttttgcaaaaccaccatctactaatgccgaagcaatggcgaccgattccattgatgtggagcatgctccaaataaacaaagaaacgggattttaagttctcttgccacatagtttgctgtgacgttttgattcagtaagtctcctgccagcaaaagatcaacatcgcttttttgcaaatttgcttttgataaagcggttgatatcgcatcatccatgagctgcctttcagccatttcccagttcttttgataacaatgcatttcgtcgtatgttttatcaataagatgaccgatcgggccttctttttctttcggtcctgcagctgttccttctgcattgacataaagcttgtgctcaaatacccaagattgtttacctgttagtttcacgtttcattcctcctacgaaaacgccttttccaagatgtatcgaatgatccctacgacatatgccgagacgacaccaaaaacaatgacgttcccagcaagcttaaacatgttcgtggctacacctaacacaagcccttcacttctatgttcaagagcagcacttgtcatgctgtttgcaaaccctgtcaccgggacagcggatcccgctccagcaaactggccgattctatcgtaaataccgataccagttaatatagaagaaattaaaatgagggtcgctacggttgggttccctgctgtcttttcattaaaatcaaaaaagtgaatatagaaattttgcagcccctcgcctatggcacagatcaatccaccaacaagaaaagccttgatgcagttgaggacataaggaggtttaggctgatacgttttcaccttagatggatagttctcttttaaactcgacacgtgttgttccctccaaattcttaaatataaattagccaatgaaatagtgaaccaaatacctttcctaagacaatggccatgagaagcaaaacaattttcccgtccattccaattcttttcgttaatataggaagtacatttaatacttcagtcagcgcagctgcaagcatgccgacgaagatgcccgctaaaagaccgatcggaagtgccagccatttggataaatgcaaatgtattggacttaaggttgcccagccgccaacgaccgccccgctgatgacagccgcctcgtacccttgtatgaagcgctgcgttttggttaattgcattaaacgagggatgatgcccagcactgtgagaaatgccacaaaccctgctcctaccgttaaaccgccgccaagtccaacaagcacgacaaaaagccacttaccgatcatgaatgtctttcattgtctctttattttctttgagggcgacataatgatcgagatcgagctgatatttaaacatttccacttcaagcggacttggttcttcatttaaacgctttttaaatacatgattgaaaaataaaatcatgccgaagcctagtccgaagctatatggaatttgcaataaataaggatgctcaaccgtttttcctgtgatcatttcatataggcggatatgaacgagccgcatactgacatcctcgtggaaattcataatggcaagcgccgctccgacaaataacaggagccatacaaacacaaataaaacgggagaaagctggcgtttgcctgtatcaatttcgacaatggcctcagcgcctccaacggtttgaatgtcgatgtctggccatgtttttttgatcgttttgaccacatgcatgatatcaagaacggcgatgtgacgatcctttttactgacatgatatatcggcattttgctaagcttttgcacagcaaactcatcaccagtgatttgggcgatatcttctaaataaacaagctgatcattaccagtcttgattcgatggcgcagccgaagaaagatttgtccgtccatccaagtcacttcctatacgatgggttaaaaatagtatgtggtgaaaaatggttctcatactgatagaacttgatttaccggtaattaccacacaaaaaaagccagcctaattggctagctgtctttttgatccatttgcatttggatttgttttaaaattttcttttcaagccgcgagacttgtacttgtgaaataccgagcctctctgctacctcagattgtgtttggtctttataatatcttaagtacacaatgagtttttctcgttcttctaattccttgatcgcttctttcagagcgattttatcaaaccatctttcttctgaatgatccgcaatttgatcaagcaatgtaatcgggtctccgtcattttcatacacggtttcatgaatcgatgtcggtgagcggaccgcttcttgggcgaggacgacatcctctggtgtgatatcaagatattcggcaatttcctggacagtgggcattcttccgtgagacttagacaattcatctcttgcccgccgaattttatttccaagttcttttagtgaccggctcactttgactgttccatcatcacgaatgaatcgctggatttcaccaatgatcattggaacagcgtaggtcgaaaacttcacatcatatgacaaatcaaatttatcaacagatttcagcagtccaatacagccaatctgaaacaaatcatctggttcatatcctctatttaaaaagcgctgaacaacggaccaaacaagacgcatgtttttttctacgaggaggtctcttgcttgctgatcaccgtcttggctttttttgatgagctctttgacttcatcatttgacagctgggctttttttgcttgcttttttacctccacatccatatgagcagctcctttaattacaaagcgctttgctttttgatagatgctttgttaaacggatggtcgtgcccatttctggagatgagtctatcatgacatcatccataaaattctccatgatggtaaagcccattccagagcgttctaagtctggttttgtggtgaatagcggctgtcttgcttcttcaagatctgtaatgcccatgccttcgtcacggatggtgaggtacacaacatggtcatcaagtgtgacatggatatgcaccttgccatctggatttccatcatagccatggataatggagtttgtcaccgcctctgacacaacggttttgatttctgttaattcatctaatgtcggatcaagctgggcgataaacgctgcgactgtcaccctcgcaaaggattcattttgacttaaagcagagaaggtcaggttcatttcattcctcatgatgccacccccaatgtttgcaatgccgtttgctctgaaggctccatacggatgattttaaataagccagacatatcaaataatcggttcactgctggcgagatagcacagacgaccatttctccgccaagctgcttaatttctttatatcttcctaaaatcactccgagacctgagctgtccataaacgttaaatcagccaaattcagcacgatgtggcgaatgtcctctgtttccaaataattcgtcaccttttgtctcaatgtttctgcggagtgatgatcaagctctcctgttaaccgaatgcaaagtacgctctcttttacttgaaaatcaatttcaaggctcatctttttattcctccttgctctaatttcggataaagattgtttctcttttttatcaagtaaatccttcaccatgacaaaactagtgaccattcgtcacatttagatgttcttttcttcttgctcatagcaaaaagactgccaattacagcagcctttcacattttatttccatttcacaaattccgccatcgctcgtttcaagaaagtccaaacgcctgctttttccattccttctttagcttctacagggctttcatgcagcacttttccgtcttttttcaagacaattgtacctagttccgttccttttgagaatggggccgtgacatcctgagacaatttgatttcttttttaatctgatccacattttcgccttttttcgttaaaagggagattggctcagaggtgacaagctgaatttttttctttttccctttgcttaccttgatctccgctacatcttgtcctcgtttgtaaagcgggtgagtggtgtattgactaaatgcatagtctaacattttgaccacttgagcgtttctgtctttcggtgtacttgcgccgaagacaactgcaatgacgcgcatgttgccttttttagcggatgcagttaaacagtatttggcttcgcctgtaaaacctgttttcaacccatcgactcctggataaaatttaatcaatcggttcgtattcacaagccaaaattttttatccgtgttttgacggagatagtcttcgtagacccctgtgaatttagtgatttgttcatatttcaacagctcttttgccatttttgccatatcatgagctgtactgtaatggtctttttcaggaagtcctgttgggttttgaaagaccgtagaggtgaggccgagttcttttgcctttttgttcatttgctccacaaactgttcttcagaccctgcaatatgctctgccatggcaactgaagcatcatttcctgacgcaatcgcaatgcctttcatcatttctttcacggtcatttcttctccaggctcaaggaagatttgtgaccctcccattgatgctgcatagtcacttgttctaaccttgtcagtcattttcagttttccttgatcaatggcttccatgatgagaagcatcgtcatgattttggtcatacttgcgggtgcaagcttttcatcgctgtttttgttgtaaagcacttttcccgtgtcacgttctattaagatcgctgatttggcttcgtgcaccaattctgatgtttgtttttctccaggtttttcaatcttttcttttgctatcgctgatggtgaaaccattgagataaggatcattaaaataaacaatgcacatatatgacgtttcaagtggcagacctccattatcgtaatcctttctattttttcctcatacaggctgttttattcagagatcgtatgattgccataaaaaaaccttctgtcgatacaacagaaggcttcttgaaacatgctatgagagttgtttgactacatcttttactaaatcaaggaaactcgctttcactttttccgttacttcaatgacttcatcatgagacagcggctgatctaaaatacctgatgccgcattagaaatgcatgaaataccaagcactttgattcctgcatgacgcgcaacaatcacctctggaacagttgacatgcctacagcatctgctccaagtgttctgaggaaacgaacttcagccggtgtttcatatgaaggacctgtcatccctgcataaacaccatgctgtacagatatacctaagcgctgagctgtttcttctgcaagtgccagcaaatctttatcgtatggggcagacatatcagggaaacgaacaccttgactgtcatttggtccaattaatggattggtccccatcatattgatatgatctgtaatcagcatgagatcgcctggatggaaggatgtattcacaccgccggctgcatttgtcacaatgcatgtctcaatgccaatttctttcatcacacggactggaaacgtcacttgcttcatatcatatccttcatagaagtgaaaacgtccttgcatagcacatacgacagtgcctttcagcgtcccgatgacgagctgtcctgcatgaccctctactgttgaaacagggaatccaggaatatcttcatatttcaatttgattggattttcaatctcatctgctaaaatgccaagccctgaacctaagatcaatccaactgttggtacgtttgtcgatgcttgtttaatgtatgccgccgcttctgaaaactgtgctcccacgagatttccccctatttgagtttagataaaaagcttgtgccgtattttggcatggctgacttgaaattgtctgcaactgttgctccaagatcagcaaaggtttttgctgttggcagttcatttgctccctgatgctttttgctgtaagcaatgagcggaacgtattctcttgtatgatctgttccgtgatgaacagggtcatttccatgatctgctgtgatcacaaggagatcatcctctttcaacaggtcaaacacttcaggaagtcgtgcgtcaaattcctctaatgcttttccgtagccctctggatctcttctatgtccgtaaagagcgtcaaaatcaacaaggtttaaaaagctgagtcctgtaaagtctgttttaagtgtatcgaccagcttgtccattccatccatgttcgattttgttctaagagaagatgtgattccttcgccatcataaatatcagagatttttccgattgcaatcacatcgagcccatcatctttcagctcattcatcactgtacggtcaaatggttttaaagcatagtcatggcggtttggtgttctgacaaatgcgccaggctccccgacaaacggacgagcgataatacgtccaaccatatacttttcatctaatgtgagttcacgtgcaatttcacaaatacggtaaagttcatctaatggcaccacttcttcgtgcgcagcaatttgcagcacagaatccgcagatgtatagacgattagatcgcctgttttcatgtgctcttcgccaagctcgtctaaaatttcagtaccagacgcaggtttatttccaataatgcctctgcctgttttttcttttagttcatttaatagttcatctgggaatccgtctgggaagactttgaacggtgtgtctatgtaaagacccatgatttcccagtgtcctgtcattgtgtctttaccatttgatgcttcttgcattttcccataatacgcaagcggcttttcatccgctggaattcctttgatttctttaatatgactcagcccaagcttcgccatattcggcatatgaagcccgttcattttttcagcaatatgtcctagtgtatctgcacctacatcattaaattcagcagcatcgggtgcttccccaattcctactgaatccattacgacgaggaaaatgcgtttatactgataatcaggcattaaaaagcgcctccttcaatattcttgtcttttgacctttcaaaaagagaggtctgacatctcaagtataaaccgtttacaagccggttgacaaccataaacggtgcaaacatgaaaaagcatgacacacgttcactgtgtcatgctttacttatgcccttggatggaatttgtgatacacatctttcagtcttgttttcgtcacatgtgtataaatttgtgttgttgagatatcggcatgtccgagcatctcctgcacggctcttaggtctgcaccgttttcaagcagatgtgttgcaaatgaatgcctgagtgtatggggtgtgagttccttttgaatccctgcttcgatggttctttttttcaaattcttccagaaaccttgccgcgacattttttttccgtgatgattgagaaataaggcatctgccggctgtttttttaacagcttgcttcttcccttttcgatatattcttcaatcgcacttgcagcagcttcaccaattggcacaatccgctcttttcttccttttccaaaacaacggataaagcccattgtgaggtgaacatcagcaagagtcagatccagcatttcactgacgcgaatgcctgttgcatataagagctcgagcatcgctttgtcacggtagtcaaacggagtgtgctgatttggtgtatcaagcagcttttcgacttcccctagtgatagaactttcggtagtttccgctctgttttttgcgtttcaatgttccacgacggatcatctgttgtcactttttcccggagcagaaattgatggaaggaacggatcgaggatagatgccgcactgacgttttgctcgatttcccttcctcctttagctgctttaaataatgaatgatatgcaggcgcgtgacatctttgatatccgtcagctgctcatgtgtcattaaaaaagacaagtagttctgtaaatctcgtttataagaaacaatggtattttcagagagtcctctctctactgtcataaaatgaataaagtcggataattgatcgttcaatgatttctactccccgttttgataaaaataaatcaatcggtcttgccagttgtcttgattcggctgatccatttccatcactttaattgctgcaccctctggtttatcataacgatggtagctttcatattctgaatttatccatatcatagcataatagaacaagacggtaaaaccagtgaacaagatgaatactttcatcacttcacctgttgttttgagccattttcgcatgattttcatgtcctttctcaagcttctcattacttcagcatatgccaggtgggacaaggaatatacagcgaaaatgcaaaaaacctcttcatcttaaatgaaaaggttccaattcggattatttgccggattcatcatcatgacaccggtggcaaataccatggaatgtcaatctatgatccttaattttaaatttccagtcacgttcaataatctcttcaacgtcttctaataaatcatcttctatctcatcgactgtcccgcattccatgcagacaagatgatgatggaagtgagcggctccttctttgcgaagatcatatcgcgaaacgccgtctccaaagttaattttatcaacaactttcagttcagttagcaattctaacgttcgataaacagtagcaagaccaatttcaggagacttctcttttacgaggaggtatacatcttctgcacttaaatggtcttcttcattctcaagcagtactcttactgttgcttcacgctgtggcgtgagcttatagctggaagaatgaagctgtttcttaattcgatcaatccgattttccattgactttccctcctacgccacattacttgatcattatatcaaatgatgtgctgagagccaactataatcattttaaattgataaataaattgattattatttaataacgattataaaattatgaaaaaagaacacctgccagctttttcatgagcatgaaagatacgtaagattcaaaaaaggacgaaagtgcagcaagcgttaaaatcatcagcaaaacagatgcataccgggcgaaccactgaacaggtgcttgactgatggtttttttcatgaacagctgcccaatgagacggatggaaaacgcaatcgcacatgtaccaatcactaaataggctggaataagcaatatgttttgcggaagaaccgatacgaacgaaaggaaaaaaccactcagccccatttgatttactagaaaaccaactgtaaacccaacgacaattccttttaaaaagatcatgagaaagatgagcggcaggccaatgatagatattcctagtatccacataagacctaaatatttcatatgatgcaaaaagctttgcaaaaacatttcttttgattctgctgctttctcattcgtcagctgaccaaaaaattgatttaaataatagaataaatcctctttctgactaattgtcatactattaacgatgatggccccaaagatcacgcccattaaaaagagtacagagacaaacaaataaatcgatagatggtcttttacgtgctgaagaagatgttccttccaagactttttccgcatgcgtcttcctcccaaatagtaaaggttactagattctatgagagagattacgaaacatgacagttttattgaaagaaaaaagagaaagcagcctaaacactgctctctcttatcatttatcgggcggctttttgtacgttcacaagcccggcaccataataaaaaggatctccaagctttgcagccgtttttgaaagtctctcgcgcacttcatcgtttgtcaaattcggatgttttgatagaatgacagccgcagcgcccgctacatgcggtgatgccatggatgttccactcttatagccatattcattatgaggaatggtgctgagcgttgaaacgcccggtgctgagacttccacttcttcgccgacagatgaatcaaaggctctttgttttctttcgtcaacagaggcaaccgccatcactgaggcgtacttagctggatagtcaaccgtgttgagagagccataacttcctgcattcccagcagaagccacaatgagaatccctttgccgtatgctcgatctaccgcttctttcagcgcttcagattcacttgctcctcccatactaatattgatgacatccatgtcattctcaatggcccattcaattcctttaatgatccagctatagtagccgtcaccattttcatctgccaccttgaccgcatagatagaagcctttggcgcaacaccaacgacacctaccttattatctaacgctgcaattgtgcctgccacatgcgttccgtgttcatgcgggtcaacaagcggatctgactttgttggaacaaagctgactccgccggtgacatgtaaatcttcatgtttgccatcgatgccgctgtcaagaacggctactttgacattctgtccggcgtatccccgtttatgtaccttttgtgctttgatgcttttgatgccatatgggatcgtttgaccgcttgtttttgccttttggtcttcctcaatgaaggtcacttcttttgcctgattcagtttctctttcgatgcctcattcaaggaaactttcatcatatctatttgctctatggattcttttacatgcccaccagcttcttcgacaagctgtttttgtgtatgatcttgaacggaagaagaaaagccgatcatgtactctttttttgcttgctcctttgcagaaatatgtgaggcgccgaacgtgaccgatgccagcatcatacttgccatacaaagccttgctccaattgacttgacgttcacaatactcactctccctttcatctttttgtcatttaactacattttcagacaaaaagaaacgaccgtttgtcctattttttaaaatttttccatttatttgaactagttgtcacaaaaaagcaaaataaaaatgcttatgatcctcttgatagtgatcataagcattccttcttttatgttttttcatcatgtgctgcaaggcttcttgttttgtttttgtctttctttcatgtgtgctaaaatgcggcatgtttcctctcgacagttccgggtttcggctgtgctgcctttcaatatgttctcgttttttctttgcattgctttttcccatttggcaaaacccctttcgttgacgttatgatacacgatgtgacataaaaaagatagacgtatacacgcctatctttctgttttcaccatatcaagatgaggaatcccatcttcatcataacaatctgaaacggccttaaaaccaaatgattcgtaaaacgacttcaagtaggcctgcgcctgaattttgacacttgtttcacctaattcactcagcttttccaaagccttgctgagcagcatttttccatagcctttttttcggcctgcctgcgtcacaagaacgcggccaatggacgcctcttcgtacatgattccgctttgaaaaattcggcaataagccacaatcgtgccgtcctcttttgcagacagatgaagcgcttcttggtcccggtgatcaatttcagggtaagggcatgtttgttcaacaacaaacacattgactctttccattaaaatcaggtaaagatcctcttttgttaattggtcaaacgtttgacatgtccagttaacttgattcatgattgatatccaccttaccgtacactccgcccccgccagcgatcagttcgacttcaccttttcttgctttgatgatgtaattggctgttttttctggcaggacagcttttagttcttgttctgttgcttgatgaaggatattcatctctgtgtgaaacacggcttttagcttctccagcgttttggctccgacacccggaataaattgaagcgggagctgatgaacataaggaggtcttgttcctttgtcactttcttggtcagcaagctcctttaaacgctcactcaccccttttgtcatccgggtatgtccgcatgcgtggcacttttcttgatctagcgcgcgaggtcttactccgcacttctcgcaggttgtatgatagtacttcccaagccgcggagcgagtccataatttcctgtaatggctcttccctctttcccttcaagggctagtttgaattcggcaaaagaggcatgatccattcggatttttgtatattctcgcgcaattttccctaaagaatgagcgtctgaattcgttaaaaagggataacggttcagctcacttatttgggacgccattgacgtatcgcagctaagacctagttcaacagcatcaatgaggtctgggtcgaatacttccgttaaagtcgtgttgactcctttgccaaataagcttttatgcggcgtgaaaatatgagcaggaataaacaagcctcctagctccttgaccttgcgctgaagtgttttcccatcaacatagaggcgctgtgaactcaaatgcacatttttcatatgaagcgcgagccatgcggagaaatcagacattttgtgaagtgtgggcataaatgcaagcacgtgaattggaccttttgaatggttatcgttaatttctaattcactgcctaaaagcagcacggtctgtccaaatgatagaccgccatcatttagttcagtgtacttgccttcctctacaccctctattaattcttctaggacttctggagattgtgcatcaatcacaccaatcatccccatccctttactttgcgttgcttcaatgagaatttggtcaattgtcagtgaccttgcacctgtaattttaacagctctgcctgttctggttctgccaatatgaatatggatgtctgcaaaaaactccctcattttgttgacttaagtacctcttgcaattgtaagtactgaatggcataggctgtttttgcatcataaatgtgctgattttcaatgaggtgcaaggcttcttctaatgaaacttccatcacttcaacaaattcatcttcatccagctctcttttttcttcaagcggaaccagctgatctgcaagataaatgtggacgatttcatctgcgaaaccaggtgatgtataaaaggccgtcagcttttggagctgctgagtggtgtaccctgtttcttcttctaattctcgcagtgctgtatgtgccggctcttctcctggctctaattttccagccggaatttcaacgatggctctctctagtgctttacggtattgcttgaccaagatgattttattttcgtctgtacgagcaatgacggctactgcaccaggatgtttgatgatttcgcgtttgccttgttttccgtttggcaattctacatcttcaagaaccaaatcaatgatttttccattatataattctttagtcgataatgttttttcttcaaagtccttcaattttgtcagctcctcgttctactttcactttttacttcattcattttaacatagatgatttaggagaagcgaaatgcgaacgcttgcttcaatgcgccacttgaaatcacctagcttgaattccagatttttttcacttaatgtgaagggataggagtgtgatggaattgaaaaaaagacgaattggtacctcggatcttttggtgagtgaggcagcactaggatgtatgtcccttggaacggaaaaaggaaaagcgctctctttattagatgaggctatagaccttggaattaattatttggatacagccgatttatatgattttgggacaaatgaagaaattgtcggggaggctattaaaaacaggcggcaagatttgattttggccacaaaaggcggcaaccgctttgaaaaaggcaaatctggctgggactgggacccttcaaaggcgtacataaaaaaggccgtgaaacaaagcctcaagcggctgcaaacagattatattgatttataccaactgcacggaggcacgatagatgatcctatcgatgaaacgattgaggcttttgaagaattagtggaagaaggcgttattcgctattatggcatctcttctatccgtccaaacgtcattaaagaatacgccaaaaaatcgaacatcgtcagtgtgatgatgcaatatagtttactcgaccgccgtccagaggaatggttctctcttcttgaagaacaaggcattagtgtcgtcgcaagaggacctttagcaaaagggcttttaactgaaaaaccactttcgcaagcaagtgcagcgattcaaaaaaacggctatcttcaatattcatttgacgatctccagcaggtcattccttctttaaagaaagtcgcttatgacctatcactcacagagctgtccattcaatatttgcttaagcattctgcggtcagttccgttgtatttggcgcaagctcggtggaacagttaaaagaaaatgttgcagcggcaaatgcacgttctttaagtgaccaagaagtaaaagcattgacttactatacaaaaccatctgtgtatgaggcgcaccggtttaaataagataaaaagagatcgctttatgtgatctctttttatcgtgtttttctctattaaaaatgagaaggggctaaaagcccctgtactcttatctatttgcactttcataatacgcataatttccggctttgcctttaaggtgaaatgtagtaccaaaacgttgaaaattatttgcaaatacgccattatctgaatgcatacataatcgattacctccacctttaaaaggagttacagaacaatcaacaattgtagtcaccgacgtacgaaaatccgcttccgttgaatcatttgtagcaagagcttgtccagaaacaggtaaaagcaatcctaaagataaagcaactccagtcattgttcttctcaatttcatgtgaatcatctccatttccaaatttttcaatgcatcttcattataagaagaatgctcctttatttaaagggtcttaattactatatttgtaataaaaagggattttaataaatcaatactcccgtttcttctattttgatcacgtataaaataggtgatgggatttagttttaaatcatattgtcacgaagctgaaatgaagtgaaattcgaaggagtcagaagagtctgctctcaaatcacctatgttttgaacaagttcatttcgtgttgatcaatctcaatgatgacatgaaaaaaaggagcatcagagctccctttttttagcttttatattttctccagtccaaatgactttcatctagcagctcggagaagcttttatttttttctttttctttctgctgccgaaggaggtcttgtcgtttttgttcttctcttttttctgtctgggcggcaaggttctgcttcatttgaaggagctgctgtttgagatcctcgtttatgccgtcctttaatttcgcttgatcttgattggtctttttcattgtgcctctctccttttgccctaagtgtatcatccgttttatttgctgagcaagagtcacgccaatctcccaacatgtggtatgatcgtcataggaaaaacttcggaaaggaagaatcagctggatgaagaaatggatcgctatacttgccttgatattatgtccgctcgctgcaatcggcatttttttcaccaataaaatgatgtatattcgaaaattaacagatgaagagctcatcaaaagagaatcagatgaaggacactatcatcacgaagagtttcaacagcttaaaaaagagaaagtgtgtattccttcagcatttggttatgatcttcatggctattttgtgccgcacccacatccacatacaacacgcaccatcgtactttgtcatggcgtcacagtcagtttgattaattccgttaagtatatgaaattattccaaaagctcggatggaatgtgatgctttatgatcatagaagacatggaatgagcggcgggaaaaccacgagttatggatactacgaaaaagaagatttagcgcaggtcgtgaagtggctcagacaaagactcggggaaaatgccattatcggcatacatggagaatcaatgggtgcagtcacgactttgttatatgctgcaaagccggaagcaagcgccaatttttacatagctgactgtccttttgcttcttttgaggatcagcttctatatcgattaaaaacagattttcgtctttcagggcaatggattcttccactaagtgatcgagtgttaaaatggcgggatggatacagcattcggcaagtttcaccgctggatgtgatcgatcaggtgaaagaacctgtgctttttatccatagtcttcatgatgactatattccatgcgagcagagtcagcagctatatgctcgaaaaaaaggtgataaacagctatttatagcgccgcacggggcacatgcgatgtcttttagcgaaaataaggcagcttatgaacaagaagttcaaggatttcttcaacaatttgaatcgaatgaagataaaagaggagaatgaacagcggttcgtctcctctttttgagctaacttatgcgatagtcaccactgttgtatgatgtctgcccgccagctccatatgactctcttccgattgctgctgactcatgaccgataatcctgcagttgctgccaataaaagaactatcaaactcgttttcatataaatgacccccattttgaatttttgatatggcttgaatcttcctttcgtaaaaccgtgtagatgcttcatacagtccaagctcattgtaataatgagccgcatcaagtgccaattcctcaatatctgggtataagcgcttgtcctcgagcaggtctaatgtatcgtctatgatcgttatttctgcatcaacgtataatgcttttaagaactgaaatttgcagatgtaaatttcatcttctaattcacaggctttcataataccttgttgatagagggttaacgactcttctatttgtttttgtttaaacaggatttgggtcagcataaatagtgggtctagagagcgattaagatgggttaaattctccttttcaaacacttcaagagagtctttcagataacggcttgcttccgcaagatcgttcatttggtaataacagttacctaagttgaaaagggccgaacctatgactcgagggtttccaattgagcgtgctcgatttagagcatttttaaagtagggtaatgcatgttcatagcatttcaaatcatcatagtttgcaccgatgacaaattcacagtggatgattctcagcgtgtacgttctgtaggcagagtacgtatctaacgcttgcaaggcatagtgcatcgaaaagtgggtttgtttcatgtggtagtatatttcagctaatttaaagtaaaattctgctctttctatatcatctgatataagattgagctttttttctgctgaacggtaataagcaatggcacttaaatagttttgctgttcaaactcaaacattcctgtgaaaaaatgaacatagtattcaagcatgtccgttaatttcgtttgcgaatgttcgatcgtttctagcaggttcttaatttcttcatcgtttgaggctttctttgccggttcaaaatattcaagcatcaccttatggcgaaaatccatcagctggtaaaacagcaacaagttttgatcctgttccatctccagaatttcctgctcgatctcggccttcagcttctcggctttcataacatgaaatccgcaaatctgcctataccattcgtttattttgattccaacctgaggcgatgacagcttgagcttcaattcactttagcacctcccttctcatatacgatacatgttgtattctatcacactccctcgaatggaagaaatatgaaatgtcatttttcgcaaagttttcggtatcccgcaataaacgctttcattgcctatttttcggcatttataaccacgattttttcatttctatttttctcattttgtcgaattggttgttataaaacggtttttttgcgttttaaaagatcatttttcagattagacatccctgctgtttgatgagatgatgaaggcacgaaaaaaacccttttgtcaaaaaagggcttttataatacatctgttacctgttccatattctctttgatccaattgacagctaattcgagcgttggaaattcttccgtttcaaatgtgacttcatcttgaagaagccaaacgtcctttttcaccgaatccattccacctattgaccagtgcaaaagggtatagggatgattgttatttaaaaacgacacccatgttttattttgtgccgtgttttgtatcactctaagcttctgatccactacgtttccaccttactttacaagtatgcccattcttggactgagtatttgctgaggacttttcagcatcaatgtattggctttttcattaaaatcgatggtcatttcctcatcaaaaaataccttctgtgcaatgtgtatatatagttttaaatgttggctattattcagttgttcccattcacctgttctttcacttgttaaccaaagcattggtacgccactcactgcacagccacaaccttctgaatcgtagcgaagcagtaattccttagtttcgtttcctatttgctgtttttctatatatgttttagccagttctgtgatgtgaatatacatggcgaacatcctttttaaattgatgcttacattgtaacacataaaacaccataaaacatgacacacgactaaatccgaaagtcatattctttgaaatacacgctcttctcactaggattatatctatctattggctcttttcgcttcttgttttttagaattatacttatgacgctaccaattttaaaagaataaacaggaggttttagatcgtgaaaaaaagattatctctctgcttcatcggggcactgatatttatgttgagtttcgctgtgccaaacatgaaagcggcatctgtccttgatgaagtacgagaaagctatgcgacttatacgggatctggttactcagggggcgccgcattattagatcctattccatctgacatgaaaattacggctttaaatcctcatgactataactataaagggataaatgcggcacttgcaggtgcttaccttgaagtaaagggtccaaaaggaaaaaccgttgtgtatgtaaccgataaatatccagaaggagcaaaaggagctcttgatctttctcctaatgcctttgccaaaatcggtaatatggcagatggaaaaatcccaattagttggaaaattgtaaaagcaccgattagcggaaatgtagcttacagaataaaagaaggcagcagtgagtggtgggctgcgattcaagtgcgcaatcataaatatccgattatgaaaatggaatattacaaagatggacaatgggtgaacatggaaaagacagactacaaccatttccttggatttaatatggggtctaaatctcttcctgttcgaatcacagatatccgcggggtcatagtaaaggataaattacccgctcttccatctactgctgcttcacaggcctatattgtaaaaggcaatgttcagcttcctaattaacgaggaaaagaggtagcttatttaagagcttcctctcttccttctctatcccagtgatatgcctcattttctatttcttttatgatttcattctttcctgccatatagctttgtatatcttccggatactgatttgctaattgttccttgacagacgcatacgcttcagctcgttctggatgggcccttaagtaatctcgaaacaataaatgccttttcacatcagggtgatttctctcataaacatggacatgatgcgtacgattcaagacacccttttgaaaaaaacgtctcccttttatgccattttcacctagcacttgatatccaagatgttcaaagctctctctttttctatcgatctcttttatatgacttacttctattaagatatcaataattggtttggcaacaagcccttcaactgacgtactaccaatatgatgtccttctatccagttcttttgaatgatttgcttgagttgctgcttttcttgatggaattcttcatgccactcttttttgaattcgacaacctcaacctttcgccttggtctccatttcatttttgataaggtgagctcttttgcaacatgaatcacatctgtttcaagaaatcctaacttttcgtatagcctttttgcaggggtgtttttttgccctgtggtcagttctatagggacatttttctccataattgtggacataagtcttgttccaataccctgctttagcgcttttggatgtacagccaatcgactaatgatcaaataatctttctgctcttcataagaggcaacacctagtaagattcccttttgctcaaaaccaataaattgctcttttgctttcattacatcttgaatggtctcttttaatggtgggagatcggcatagccaatttgttcagcttcttgttggtatgcagctagttgaatatgtaagatctgctttgctacatcacttattgtttgatctaaattgacaatcattgcattgcctctaattttttcacaaataaaacacgatcttcatttattccatcatagtctgaaaacacggagattccttctacagttttgtcccctttttcaatttgaaagcccaattttgcatgataggcaatcgatactttatttacaggtgctgttaccgctttaatggttgttcttccttcctgttttgccacatcataaaaggcttgatataggatttttcctatctttaatttccgatggtctggatgtacacctacaaaatgaatatacgcttcatctgaatgagattgcgataaaaaaccgactaaaaagccaataagttcacctttttcaacgacgacaaaacttgtttgctgaaaatgttcaaaaaatagcttcggcaattttgcgcgcaaatctctgcctccccaccagctttggatgacggatgtgacggcgtaaaaatctgacggcttcacttgacgtatcatgatgacctcgccccttttcatttttggcttaccgctctctttttttaaaaaactgttgtttcaatagtctacctgttcgattaattgtttgtaaagatcacgtgtcagccttttttcctttcagctttgttgattcttcgttctttcgccgtcatctccttttaaatcttcacacttatttcaaaaagttcactttttgtgcgaaagtttcattcttttggtatgttaagatggttcatataggaaatgtaacaaatgtttattggagatgatgatattggtttggattgttacttcacttgttgtgtttagtcttttaaagcttcttgtcacttcgctgccttctggtgttgtggaacgcctttttagtcgttatgcggtgcatgcaaaagtaacaagtgatcaaacaacgatcatgtttgaagatcgtccgctcaatgatcagcaagtatctgaaattattcgacattttaatgatgcgatctttattgaacgctattatatttatcctggtgatgaagagcgttttcttcatccgcaggaagggcctgcgccgcttaccatgcaaacaaagcttggcaaacatgatgtgaccctttatctgtatcattacgatgaccacgtggatgtggtgcggcagtttacacataagcctaagaaaaaactgacggcctatcgtttgcgttctgagccgctccaaacatctcacaacttggcacatgcttaaaataatgttgcatcaaatgagacgaagtggaagacacttcgtcttttttgtatggatttacactcttttctttgaatgatttaccagtatcaatttcgcctcctgacggttacaatataaacagaacatacgttctaagaggtgaaaataatgaatgaacgagccattctgcttgtggatatgcaatcgttttatgcgtcagtcgaaaaagtggaggctccccacttgaaggatgtgccgctcatcgtctctggagatcctgagcggcggagcggggtcgtacttgccgcctgcccgctcgctaaaaaacgaggcgtacaaaatgcatcaagattatgggaagcgcaggagaaatgccccgaagctgtcgtcgtacgcccccgtatgcagcgctatcttgatatctctgtcatgataacagagctgctcgaacaatacacagatcttgtcgaaccctattcaattgatgaacaatttcttgatattacaggcagtctgacactactcggttctccccgcgagatcgctcaaaatatacaaacaaccattatgaaccagactggcatttacgcacgtgttggcatcggtcctaataaagtgctcgctaaaatggcctgtgaccattttgctaaaaaaaacacatctggtatctatgaacttcgtacagacagtgttgcggctgatttatggccgcttccgattggaaaattatttggcgtcggcaaacgaatggagcaccatttaaaacgaatgggcatcagtaccattgggacgcttgctgcttatccgttagaccggcttaaaaaacgctggggaatcaacggagagcttttgcagcgaacagctttagggcatgatccctctccggtcaccattcacacacatgatcagcaaaaagcggttggacatcatatgactcttccccatgattatgcgtcttttgaggatatcaaagtcgctcttcttgaattgagtgaagaagtggcaagacgtgcacgctttaagcattatcttgggcaaacagtgtctgttggcgtgagaggcgctgatttttctcatccgactggatttcatagacaaatcaagcttcattcacctacacagtacgggacagatattgcagacgcagccattcagctatgccagcagcactgggatggccagcccattcgcagtgtggggattactctctcacagctgcagtctgacagccaatatcagctgactttatttgatcaccatgttcaaaaagacaaactcagcaaagtatttgatgcgatccacatgaagtatggacctgctgccctgctgcacgcttcgtcactgacaagcgcagggcaggcgtatcaccgcgccgaaaaaattggcggacattacaaataacggaggcgaacagccatgaatcccaataaattaacacctggatacaacctcatgtgggaatcaagccgaatgatgcttccagagcaccgggagcagctgcttgctcaaaaacgaaagaaaaaagagtacacccctcccccgctgagcaccgatcagctggaggaaatgaattttttgatcacacagtcgattaccgaggatcaagcgatttgcgtgacatatgccgcagcaggtatgaaagagcagttttggggctgggtaaaaaccattcattatgaaacgcagcgcataaaaatcgtcaatgatgaggatgttctcaacctgtccttgcagcaaatcgtcgcgatcgaccttgattaaatggtcgccaaatgaccgcgcgaatcagtgacatagaagcactggcagcaaaaagcaaacctccaaatggcgagccaatcttgcttctttgccatatggcagatgtctcctccatcaaattgtgtatttaatttgcacaatttttcatgtatgattggaacatcttacaaactcaggggagaaacagcatgaaaaataacttacgtacgttacatccgcttagttggacgatcatcatcggcaccatatttggccgaatggcgacgtccatgagcattccttttttggccgtttatttgacacaagtcaaaggcgcctcagcgtcttctgctggattaatcattgccgttagctctctgattgggatcgttgcgagtttttacggcggatatatttctgatcgtatcggcagaaaaaaggtcatgcttctatcgatcttcggttggtcacttgtctttgttggctttgcatttgcagatgccatttgggtcttctttatcatgaacgctttaaacggactgtgccgggcactttttgaaccaacatctaaggcgctcttatctgatgtcaccccatcaagtattcggttgtttgtgtttaatttacgctatacagccattaacataggggtcatcttcggtcctcttcttggcttatatctcgggtcatcgaaaacaacgttcccatttctcgttgctgccttcatttacttgttatacggattaacgctggtctggcaatttcagaaacatccagttgctgctccagaaagcacgaaacaaattggtgtcaaaaaagccctttccattatccaaaaagatacggtctttagcattatcctcatcggcgtgaccttatgttcgttcggttattcgcatttgagctcaacgctgcctcaatatttatccgcttcgcctatgattgaggatggtccgaaactgtttggataccttttatctttaaatgcagttgttgtcattgtcgtacaatatccgctcatcatgatcgccaagcgctactccaccattttgtcgctgaccactgggaatattcttcttgccggcagtttgtttgccattgctttttcacagagtctcggcatgcttgctttcatcattgtcgtgtttacaattggagaggttctgctgtttgcgatgatggatctttttgtagacaatgtggcaaagccagaagtaaagggatcgtactttggtgcgatgggattttctcagctcggcagcgtcatcggaccatttatcggcggactgtgcattgactattttggcgcagcccatcccttctccattttttcagtcttgtcgatggtcaccatcgcaggtgtcccgttcttactcattggatactaccgcctgaaaaagcgatccgcagctgcggtcgctgttaaagtcagtggagatcattaaaaaaaccgctctcgtttgagcggtttttctttatactcggcggatagcaatctcttccaccttatgctgatcaccttttttcaaaatgagatcggctcgatattttgtcggtaaaatattttgatataaattagggcgattgacggtattccaaatcgtgcttgccatgtgatctgcctcttcatccgtcaaatctttgtattgatgaaaaaaggattcagggtcttggaaagctgtttcccttagcaaacggaaccgttctttataccatgattgaatttgcgtttcagcagcatctacataaatcgaaaaatcaaagaaatctgatacaaacacacgcggttcatccttcagatcatccagcgctggggattgcagcacattgattccttcaatgatgacaatatcggcatcctccactgtttcatacaccccttcaagccggtcataggtcagatgcgaatataccggggcatgaacagtttgtttgcctgattttaattcgtttaaaaaagataacaaggctttgacatcatagctttccgggaagcctttcttttccatgagtcctcgatcctttaattctttttgaggatacaaaaagccatctgttgtcacaagactcactttcagcccatctccaagtctcgataaaagcgtttcaatgatacgagccgttgtacttttcccgacagccacacttccagcaatcccaattaaaaaagggattttcgcatgatgcgggtagtttaaaaaggcattcacatgctgatttttttgtttttctgcaaagacatgcaatgtcagaaaacgaataagtggtatgtaaatatcttgaacttcttcaagcgataaatagtcatttaatccttgaagtgctctcgcttcctcttctgaaacagataccggcatatattccccaagagcagaccaagcctctcttgtatgccgtgtatataaagtattaaaatctagtcgcgtgtcactcaaagtctttcccaccaatcttcactaaactcgtaaccaaaaagacgataatccgattgtagcttaaaatgaaggcgctgtctttatttttcaactaaagtttgcttcttttgcgaaaaaaagcattaaaaaaaggaaaatgagggtaaataagagtattcagttcgatagatagaagggagcacaccaaatgaaatatgtgatgattggcggagatgcagcaggaatgagctgtgctatgcaaatatatagagaggatccagaggcacatattgtcgcttttgaaaaaggagagattttctcatatggacagtgcggccttccctacttgatcggcggtctcattgatcatcacagcaagctgattgcacgcagcgctgaaacctttcgcgacaaatatggaattgatgctagatgcttacacgacgtgacctccattgacccaaagcaaaaaacggtgtcaggtcatcatacgaaaacaaaagaaccatttaccgaaagctatgaccgcctcttaattgcgacaggagcaagccccgtcacactgggtttagacaatcagccgctagaaggcgtacacgtattaaaaaccattccgcatgcgctgtccattttagaccatttaaaacaaaatatcacacatgtcaccatcattggcggcgggtatattggcttagaaatggctgaaaatttaaaagcgcttggaaaaaaagtacatatcattcagcggggttcaacactaggtccgggctttgatcccgatatggcgaagcacctgaaagaagaggcggatgcccaaggtattcacgtgacacttggggaaaccgtgcagacattagagggcgagtcacatgtaacagctgttcaaacagacaaacaaaccattaaaacggatatggtcatcatggccatcggcgtcacaccgcaaacatcctttttagacaaaacaggaatcaagcgtcttccaaatggcgccattgttgtaaacgaatacatgcaaaccaatgtaaaagacatctatgctgctggggattgcgcagcaacttatcaccgcatcaaacaatcactagattatattccgctcggcacaacggcgaataaacaaggaagaatcgctggttttcatatgacgggaacaaaccgggcgtttcaaggcgtgactggaacagcagtgatgaaatttatgagcatgacagcaggacgaacgggcttatcagaaaaggaagcacaagcagcggacattccttattccaccatcaccattgacagtacggatcacgctggatattatccagatgcgcagaaaatgaaagtcaaactgatttacagaagtgatgactacaccttgctcggtgcccaaatcatcggaagaaacggtgtagataaacggatcgatgtaatggcaactgccctttaccaacagctgaccataacagatcttgaagatttagatattagctatgcaccgccttttaacagtgtgtgggacccgcttcaacaagcagcaaggcggagataaaaagacggtcacaatggcgtcttatctcaaaaaaagaaaccagctcacgaccggtttcttttttgttattttttcatcatcgctttgcgtgctgctttttcaaataaaaacgggaataattgatacaatttactgccagcgttcatccatccgggcagattaatctctctttttttcgtcatcatagcggatacgaccttcccagccaccttgtccgcactaagcatcatgaattcaacattcttcacatattcaccgctgcgatcggcgatggtaaaaaagtcagtggcgatcggtcctggattcaccgtggtgacgtgaatgccgaggtctgccagctccattctaaggctgtttgaaaatccaaggacggcatgctttgatgccgaataaatggctgatttcggagtggcaatctttcctgcctgagaagcaatattgataatatgtccctgtcctctttgtttcatctctggaatgacctttttcgtgcaggcgattaagccaaacacgtttacttcaaacatcgacaccatttcctcaatggacgcatcttcaacgagatcaaacgcaccaaaaccggcattgttaaccaaaatatcaacagcccccacttcttgatatgcgcgatcaatgtcctcaaggtgactgacatctagctgagcgatgtgacacaccccgccagcactcataatcttttcttttacacccgtcagcttttcgattcgtcttgctgaaataatgatttctgcgccttcttctgctgccaagtacgccattttttcaccaatgcccccagatgcgcctgtaatccatatcctctttcctgttaatctccccatgcgtttcactccttagtttgccctgtaatagagaattccgtctttttgcacttcttcaatttgtccagcttctaagaggacatccagctgcccaactgtctccgacatcgttaaaaataaggcctcttcatacagcactggaaatagcttgcggcaaagatgaaaggcagtcatttcttttcgtttgagcagctgatacatcgtatttgcccgtttttcttgtttcttaaatctttcttcgatcaattcatgatgagacgtgatgagctcaccgtgtcctggataaatcgtcttgattggcagatgcaataatcgattgagtgatgctttatattgaagcagcgatttttggcgttcctccccttcaaacggcgcttccattaacgggtttgaggaaatggtcgtcaaaagcaggtctccaccaatgaaatggcccgatgtttcatctagaaaggaaagatgagattgtgcatgtcccggtgtttccatcacgaagaagtgttcatgccctttcaaccgatcgccttctttgatgacgtcatctacatgtgcagtacaggaatatgtataagattgcttcacgattctttcacactcaccttgacgaagcggcacacctaactgctgaaaaaagcgttccataaaagcaatttgacgctctttaaacacagggtcctggctaatatacggctcatttaactcgtgtccgatcacacggacatgaggtttcatcagatttaaaagaccgacatgatctgcatgatgatgggtcaacaccacttgatcaatatcgtctatcgataaacgatgctcttgtaattgcgcgacaaaggcgtgctccgcctcttctgtcatcggcccgcagtccactaaggtcacggcttctccttttaatatatatgcatgtacatccccaacagcaaacggtgtagggatggataattgaatgatgtcttctttcacttttatatgtcatctcctgctttttgactcatggttcattgtaactctgtcttctttattcattgtatcttgcaaaaggcagactgtcatgcggtttaggcggtcaatttttttatctgtccctattgacacaaacttgtccatcgttgcataatgaacaacaaatataagatgcgcgatgacaaggattagtaagcaaaataatgatgaaagagagtgaggtccgccggctgtaaggcctcaccgtcctcttatttgctgaacctgccctttgagctgttaggcaaacctaaacgtttcccgcgttaagggactagagctgagtatgcatgtctgcatgctaattgagggtggtaccgcgaaaaacctttcgtccttttcaggcgagaggtttttttattttctacaaggaggagcagcttatgagtaaaattggatttattggtgcaggctcgatggcagagtcgatgataaaaggtttattaaaaagcggcatcatgtcaaatgaagatattattgtcacaaacaaaacgaatgaaaaacgtctagaagaattaaaggtgcgttatggggtcaaaacggatttctctcgttcttttatttatgaagaagcggatattctcgtatttgctttaaaaccgaaagatgcggaaagcgggatatctgatgtgcggcctcatttacaaggacagttgatcatttcgattttagctggcatctccattgaaacgattcagcactatgctggcgagaagactgcggtggttcgcgcaatgccaaatacatcagcggcgattcagcaatcagcaacaggcattgccgtaagtcaagaagtgacagaggatcaaaagaataaagcaatcgagctgtttgaaacgatcggtcatgtgacggtattggatgaatcacagctgaatgctgttacagctattgcaggaagcggccctgccttcatttatcatttgattgaaggaatggagcgaggcgcctcggaacttgggatggaccaagcaacagcgaagttactcatttgccagatgattgcgggcgccgccaacatgcttcaaagcagcggtaaagaacctgctgaattgcgcaaagaaatcacaagtgaaggcggaacgacagaagccggcctgaacacacttgctgcctatcaatttgaagaagccgttgtcgattgtgttaaaacggcaacaaaacgcgcagcagaattaaacgaaatgttttcagcaagcacgtataaatgatagagaaaagcacctgttttgatgacaggtgcttttttacatactgctatcgttcactctttgacatgatggctttgatttgatccagatgatgttgttcatgtaaagcgatggtttcagctaatatttgcactgtcatcaccccttcttcaggatgcacacccgattgctcccatgtatccttttctaatagatgaagtgtgttgtttcttctctctttcaatcgtttgatcagtgctttgatctcctgttcgttatacctttcatagcctctttccttcacatatatttcaggatcatacgattgaaaaggcgtctgctcatctgatatcgcctgctctatccgctctgaccagacttcttctgtatcatacaaatgccctgcgatttgcttgatcgaccacttgccctctcccaaagattgatctagcgtgtgctcatcacatatttccactagcttttctagttcacggatactttcctgaagcgatgtaatgatgtatgtttttgttaattttccagtttccatttcatcctcacaatctcccttcaaataagtgtaagtcttattctttatcatactctatctaagtcgatggatcgtctatttaaaaataaaagccctatcatcacgatagggctcttcatcatatacttactttttctctaacaaagcatgaatcgctgattctagtaattctggcaaaatgccgaatgagaacgggatgtgcagccgctctgtccatttgtgcgggtcctttcctaatggccccacgttgataactggaacgtaaagtgctcccttttctccttccggtaaagaatagcctttttgataaagcggcatattggtcgtgtaatgacctacttcctgtttttcgagctgtaagtaacttaaatcagacaatccagggaaatatttcacttcttctatttcaagtccataactcttttttgcctctatttgaatcctctttaaggttgcttggatatgcggatcttccgttgaagaaaccgcaggataaaatggcggactataaaatagaacaatcagcggcccttcttccttacaaagcgtcgtcagctcagagatgattttggttgaaaaatcacgatctccaagctcacctcgattggcgaacgcatagttaacaatgcgttcaacctcctgtttacctgagcgttctgcagctttttgatacagctcatgatacgtgagaaccgtgatcctcgtatcaatcggtgtaaaaggtttaaagcgctgaaattcagctgttttttgttttaaatcggcttcgatttggtctgctgcttgtttcgcagtgtcataaagaagcccgtgcagttcttcacttgaacgattcatcatcagcacattaaataatgaaacagctgtgtgaggtgtttgaacggaataggcttcttttaagtccttttgcatcaagttggtgggcggcggcgttatttcaccgtctacttcctcacaataatcactattcagctctaacagccggtttaattcagataccataaaattcgcatttaagcctgagaatggctctcctacatgtgtttcaattcctttgcagaaaaatccggccagcaccttccctatactgcctgtatacatatatttgtgttcatcacctggatatttttcaaacatgggctcactgtttaagcacgcggtatagtcaaggtcatgcttttccttaagctcctttagtttcggaacagcttcaagcattccttgagaattcacttcttcatcagggactgtgacgagcaggacatttccatgaaaggtttctgtcatcgctctttccagcatagaaagctgtacagtaagacctgctttcatatccatggcacctcttccaaacaaccagtcacctgaagctagatcttctcttgctctttttgggagaagcgcacttttttgagaaaatgacgccattaactcttctggcttgcatgccatgttttgaaattcaccgtaatcttctgtatcgacgacatcgaaatgactaagcagcaaaacggtacgtggcagcgtgctgcgctttacaagcgccgttaaataataccggccatctttcatcggatgcaaagccaaatgatcagggttctgcttgaaataaggccgctccctcagcaaataatataaatattcagctaacgcgacttctccagttgtacccgatatgctttcatactgcataagagcggtgagcagttcctttagttcactctctgtttgccatttcatcccttttccccctttgttgtctctatctctccattatacaaaaacgcgtataaaagctatattctttgagcaccttttatgacgaaagtttgaatggctgttataatcggctatacaattccatgaggaggcgaaggtatttggaaacaaaactcttttcaccttggacattaaaaggtgttacactgaaaaaccgcatcgtgatgtccccgatgtgtatgtattcatcctatgaccatgatgggaaattacagcctttccactttacacattatatttcccgtgcccaaggtcaggctggcctgatcatggtggaggcaagtgctgtttctcccgagggaagaattagtgatcaagacctcggtatttggagtgatgagcacattgaaggatttgcttcattaaacgaacaaatcaaagcatacggaaccaagacagctatccagctggctcatgcagggcgtaaggctgaactaggtggtgacatcctggcaccatcaagcattccatttgatgaacagtctaaaacccctgccgagatgtctatcgatcaaatcaaagataccgttcaggcgtttcaggatgcagctgtccgagcaaaaaaggccggctttgacatcattgaaattcatggggcgcatggctatttgatcaatgaatttctttcaccgctggcaaatcatcgaacagatgactatggcggttcaccagagaaccgttatcgtttcttaagagaagtcatcgatgcagtcaatgaagtatgggacggaccattatttgtccgtgtgtctgcttctgattacacgacaaaaggacttgatattgcagattacattggcattgctacatggctgaaggaacaaggtgtcgacttaatcgatgtcagctcaggcgctgtcgtacaggcgaaaatcaacacattccctggctaccaagtgaccttcgcagaaaaaataaaagaaggtgccggtattcaaacaggggcagtcggtctgatcacatctggtgtacaggcagaggaaattttacgaaatcagcgtgcagacttaatctttataggcagagaatttttacgggatccatactttccaaaaacagctgctcaagaacttcgtacatctatcgaaggcccgcgtcaatatgatcgcgcttggtaaaagctcatagaaaaaaggtgtctattttttgaaataggcatcttttttgtttttaagagaaacatatcagccttttgtgccgtcttttagctaaagaaccacttagaggagatggaagaatgaactcggcaatgattgaaagaatgtatcatatagatggacatcatttttatacaaaacatcgtcaaggcaaaaggcaagccaccattatctttgaagcaggctacggcatttcgggtgatacgtggtcgaatatggtccgcgatattgatcctgagcttggggttttcttatacgatcgattaggaaatggaaagagcagtgacagcagtgaaggaagaacattgcatgatcttgcagatgatttagatgtgctgctagaagaagccaatattcagccaccctttctcattgtggctcactcatttggctctcttgtcagccggttatgggcaagtcgcagaggagatgacgtcattggcatggtgatgttagacccagcaagtgaggagcaagaacaggtcatcctgccgcttttatcaaaggaagaacgcacctcatatatggcgcaattcacagcagaatgtacacatgaggactttcagcaaatgctaagtacaatgaaagaggagcaaacccattatgggatgatgccgctccttgtcatttcctcaggtaagagccgattgtttcatccagcgcatgaagcttggctcagacttcataaacggatgctgtctttgtcatcccaaagcggatggattcaggcgcagaacagctcgcactatattcatcatgatgaaccgcatattgtgcagcttgcgatctatgatgtatggtgcgcagccaaacaacctgtttcctattatcaaacagccaattaaaaacaaaaactccttgactagttatcagtcaaggagttttcttttctttatgccgttggagcagactgactttttttagaaagcagcttttcaatgctgacaagctgaacacataatgtaaagatgtcaatcgcttgctctagctcttcaagtgttgggaacgttggcgcaatgcgaatgttacgatcaagcgggtcttttccataaggatatgtcgcgcctgcacctgtcattgtaacacctgcttcttttgccttttgcacaacagcttttgcacaatgatcgagcgtatttaaactaatgaaatatccgccatttggcttgtgccattcagcaatgtctttcccgccaagtgtttcatcaagaatggaaagaacgaggtcaaactttggcttaatgatcgctgcatgttttttcatatgttccttcaagccttctggattcttgaagaaacgaagatgtcttaattgattgattttgtctggtccgatcgtttgaaccgataattgcttttgagtgaagcttacattgtccgggctagacgccatcagtgcaatacctgatcctgggaatgtaattttagaagtagacgcaaacataaacacacgatttgggtgccctgcttcctctactgcttgaaaaatatcttttaacgtatcaggcgtatcagttagatgatggactgcgtatgcatcatcccaaaaaatgcggaagtcgtctgcttttgttttcatagaagcgaggcggtcaacaacctcatctgaatacgtaatgccatctgggttgctatatttcggtacacaccaaatgcctttaatcgcttcatcttctgcgaccaatttttctacctgatccatatcaggtccatcagccttcatatcgactgtgatcatctctatgttaaatagctcacaaatggcaaagtgacggtcatatcctgggcttggtgcaaggaattttacttttggcagctttccccaaggtgttttgctgtcatatacgccgtgagtcatggcacgggcaatggtatcgtgcatcatattaaggctggaattaccgccgatgatgatttgttctggcttcagattgagtacatctgcaaaaaatgtcttcgtttcaggaagccctgtcaagccgccatagtttcgcacatctgtgccatcttcagcagtcatcgcatcctttgatgtcacaacatcgagcatgcccatagacaaatcgagctgttttggtgaaggttttcctctagacatgtctaagtgtaagtttttacttttataagtttcgtactcattttgtagtgctgcatataggtcatttaattctgcttcacttaacgctgtaaaaccgctcatctttgattgtgcctcccgtattcttcatagtttcattcgtcatttgttttttcttcaccattttaccactacctgaaaaagagagtcattataaatatcaaaaaaatcacacaactttttttgacgattcatccaatttttacagcgtgcggtcaatggaaaaagaaaagaaatcatgtgcagcttctgtcagcgggaatatatcgcgggcttctttcaatagttgtttcagtgcctcttctccttggtaacgtgcactaatatgggtcaaaattaatctttttgcgcctgcttcctgcgccgttttcgctgcttgttctgtcgtgctgtgataataattgtaggctagatcagcatcttctttaccgaatgttgcttcatggactaacacatccgcatctttggcaagccttgttatattctcgcataaacgggtatctcctgaaaatgcaacgattctcccttttttagggggttccaaataatcggttccatcaatgattcttccatcttcgagtgtcacggtttccccattttttaacttctgatacaaaggtccaggttttacaccgatttctttcaggtcttcggcttttaatgcacctggtacatctttttccactacccgatagccgtaagctggaataccgtgagatactcgtcttgcttctacttgaaaggtatcatcttcaaatatgatcccttcatctatctctatgatatgcagcggatatgtcaaatgcgtttgtgtagctgaaagtgctgcgttcacaaacgctttgatgcccttaggcccatagatcgttagttcatcctctccgccttgaaaggatctgctgccaagcagtcctgggagaccgtatacatgatcaccatgcatatgagtgataaatattttctcgacctttctcggtttaatcgttgtatgtaatatttgatgttgcgtcgcttctccgcaatcaaaaagccacactgcttttctttcttctaaaagctttagcgcagtgcaagtgacgtttctagtttttgcaggaatgcctgcacctgttcctaaaaagagcagttccattacttttcctcctaaagccggtatacaatatcttcattcatatagaatacatgaagacaaggtaaatgtgaattcagcggaattttcgaaaaaagtcaaacgagagcagaaaaagtcgaatcaaatgtttgctttacgaacaatgaacctttaaaataaagaaaatgtacatacaatctcggtttttacaacaatgctacgaataaagtgaggtacttttcgtgaatacagaaactaacaatccaaaagcagtcattgtcatttttggcgcaacaggagatcttgccaaacgcaagctctacccttctatacatagactttttcatagcggaaagcttggtgatcaattcgccgtcgtcggtgttggacgccgtccgtggtctcatgaggatctcagagctgtggtgaaagaatctgtttcttctgatgatgcagaagcgaaaatagaggaattcagttcgcatttttattatcacgactttgacgtatcaagccctgcttcctatcaatcgcttaacacacttttagcaggccttgaagatacgtacagtatcccaaataaccggatgttctatttagcgatggcaccggaattcttcggaacgattgcgaagttcctaaaaagtgaaggcgtatcaaaaacaaccggctggtcaagacttgtcattgaaaaaccatttggccatgacctgccaagtgccaaaacattaaatgaagaaattcgagatgcattctctgaagatcaaatttatcgtattgaccactatctcggtaaacaaatggttcaaaacattgaggtcatccgttttgcgaatgccatttttgaaccactttggacaaaccgatatatctcaaacattcaaattacatctagtgaatcattaggggttgaagaccgggctcgctattacgaaagttcaggtgcactaagagatatggtccaaaaccatatgcttcaaatggtggcacttttagcaatggagccgccaattaagctgaatacagaggagatccgcagcgaaaaacggaaagcattacgcgctcttcgtcctttctctaaagatgaggtcgatcaattctttgtccgcggacagtatgatgctggtacggttgatggcagcatggttccttcctatcttgaagagcaaaatgtagacccgaactcaaacacagaaaccttcgttgcagggaagctgctcattgataactttagatgggccggggtgccattttacattcgtacaggaaaacgattagaaaagaaatctactcaaatcgttgttcaatttaaagacattccaatgaacctgtactatggaaacggaaattccatgcatccaaacttactcgtcattcacattcagccagatgaaggcattacccttcacctgaacgctcgcaagcttgatggcggtacgtatgcgaaaccgattaagctcgactaccaaacaaactataacgacatcatgaatacaccagaagcatatgaaaagctgattcatgactgcttgctaggcgatgcaacgaactttgctcactgggatgaagtggcgctttcttggaactttgttgatccgatttctgaaaaatgggcagaaaacaaaacattaaaaccaaattatcctgctggttcaatgggaccaaaagaagccgatcagcttctagaaaaagacggatatcattggtggaatatataaaatgaaataaaaaagagcagtctccctcgggggttctgctctttttttaacgtcctgttttcgtaatttcaaccgttgaaaagtcgaacttatcatagcggtgatgactaaaggagtactcaaacgggcggcctgtgtttaaataagcaacctgctcgacttcgagcacaggatccgttgggtcacagcctaaatattgctggtccagctcatctgatttagccgctctaattttcttgtgcgctcctgccacttttaaatggagttcatttgatatgtagccataaatcgatcccaataaaacctcttcatctatgcccttaatgacattgaccggcataaacgttttttctaatacatatggctcctcatccacgaggcggagccggatgatgtcataaacgggtgtggttaagtcaatggataggtgggctgccacttcttcgcttggaaaatggacatcaaagcgaatgatttggctcgtgacgtttttgtccgccatgactttcgtgaatcctttattttcatgaccagatacattaatagccccttggtttagcgctgccttcacaataaatgtgccgtggcctctttttctaaagagcagaccttctgctacgagaagatcgagcgcacgcttcatcgtcattcggctgcattgaaattcagcggcaagcgagttttcatctggaatgggttgatcttctggataataagctgttcctattcgttttctgatttcttctgaaatgagttcgtactttttcatctcacaccaccaactgacttgttttttcatagcttcctctcattctacactaagcctagtgagcttaaaaggtaccagccatttttgtttcatccacttaccgtcacataagaaaaatacttgcccttttcaggaaagagcaagtatcttgattaaaaaccgttattctctgataccgattgaaaccagtatccgcttttcttgatggttcgtttcccgtcttcttgaagatcaactgagacaaatccataacgattcttataggcattcgaccatgaccagttatccataaacgtccacagatgatagccttttacattacttccttcttgaatggcttgatgcacccatttgagatgctcagaaataaagtcaatgcgataatcgtcatgaatcattccttctttatccttaaaccgctcttctccttcgacacccattccattttcagaaataaagcattcaatattatcatagtctgtttgaacttttttcaatatatcataaatacctttttcatagatttcccagcctcgatacacattcatttttcttcccggcatttcaaacgcatcaaaataatgatttggcataaatggtgctttcggatgcggcatatgctctttcgctttcactcttcttggctgataatagttgatcccaaggagatcgacggtattctcttgaatgagctcaaggtctccttcttcaatacttggcataaagccttctttctttaagacctctactagtttttctgggaaatgtcccttcaccgcaggatctaggaaggaacggttaaagaaagcatcagccatctcagctgcttctacatcgcatggattctggcttcttggataagatggggtaagatttaggatgatgccaatcttcccgccttgctgcagctttttataagccgcaatcgccttagcatttgataaaagttcatgaaaaccgacctgtacagccttttggaaatcgacttcgtttggataatgaaagctatacatatacccgccctctacaggaactatcggttcattatgggtaaaccattttttcacccggtcgccaaataattgaaagcacaattccgcatagctgacataatcatctactacctgtctgttcacccatccgcctttttcctgcagcgccattggcatatcgaaatggtacaggttcacaaacggctcaatatcatgtgcaatcagttcattgatcacatcattgtaaaaagatactgcttcttcattgaccacacctttcccttcaggtaaaagacgtgaccatgaaatggacagccgaaatgaattgtgcccaatttctttcatcagacggatatcctctttatattttcgataaaattgggatgtcacgtttgggcctacaccatcaaaaaaacgagtcggctcttgttcaaaccaatgatcccaaatattcggtcccttaccatctccagggacactgccttctgtttgcgtggcagaggcagaagatccccaccagaaaccttctggaaatgtatatgattgcttgttattttccatcgacatgtattgagtctccttcgcctttgatgtttgttgtcttcgttttttccgttggggttattttttcattcttcacattcatacggtcaataaacttcaggaacgggaaccaaatgacaaacacaatcatcagattaaacagctgaagcagaccgcccgctagtgaatttgttgccattattccgctaataaagatcggcaccgtccatggaatattcacgcctgtcggcggcggtacaatgcctgttgccatcgcaaaataagaaatacatgtaatgaccattggcgccaaaatccatggaatgagaataagtggattcatgacaatcggtaaaccgaaaataatcggttcattgacgttaaataatcctggtcctaagccgagctttgctacttgttttaattgcttacttttcaggaaaattaaaatcgtaaacacaacagccagcgtcataccggttccgcccatgccaaccgtatagatttcgataaactgcttgctgatgatattcggaacctcaccagtttttgtgtagctctctagattttgaatggacaatgtattccaaatcgggtccatgacagagttgataataatttggccgtggagcccaaagaaccaaagaatttgtataaagaaaacagcgatcaaggtcggtatgataccgcttccaagtccaacaagcggcgcctgaatggcatgataaatcaggtcatgcatgtttgttttgaagccttgtgtaatgatgatattgatcagtaaaaaggttgtgagtgtcaaagtagccgggatcagtgcagcaaaagactttgaaacagctggcggaaccccttgcggcatattgatgacaaatttcttttggacaaaataacgataaatttcagcagacaaaaagcctgtgatcattcctaggaacatcccctttgctcctaaacgatcgactgggatcacacctgcaatagatgcaccgccttcttgttctagtaaaaatggcgtcagaagcaagaaagaggctaaagcaatcacgccgccaaatacagcttccacatcatagcttttcgataaatagtagccaatcccaaatacaacaaacacgctcataatgctgatggtcgcacttggcgcgatatttagtgcagactggactccttccagtgcggtttgactcatgattttatctaaaaatggcaaattcattagcacaaccataatggaaccaaaaatggtgagcgggaacgcaagcataaaagcatcccgtaatacacctaaatagcggttgttgttcaatctcccagcaatcggaaccaaaatggcacttattttatcaaacattggtttccccccttgtttacaccctttattgtttaagcgattggaaaatcggcaggagctctcccacaagctccttgatcgtaatggtggacattaagtgatcttcggcgtgcatgagcaataaggagaaaggtgttttctccccacctgcctcttgctgcacgagttgaaaatggatgccatgtgcatgacgtaaatcttcttctgcttctttcatgagactaaatgcctcaccttcttgaccttctcgaaattgtttaagagattgaagcaatttgctgcgtgcatttccactgtgtaagatcaattgaaaactgacttgttcctccgtgagcccttcgagtgttttcttttccattctttacgattcctccatcaatgtaacggcttgttcatacgctttttgtccatcggcaagcccgtacgcctgcatatctatgacctctactgcaatcccgtattttgttgcttctttttgaagatccccttttaaaaagctcatttgcggtccaattaacacaacatccgcattcgccatttcttttctcgcttgatcttgcccaactgcccaaatttctgcctcgtcccctattgagtcggcatgagccttcatctttgtaactagtaaactcgtagacattcctgaactgcatgctaataaaatacgtttcatttctctcaccccattgttgtaataaaagcgcttccatttaatattatatatttttatttttaaatgtctagacatttcattttatttgtctgtattttatataaaaaaagagcgtcatgtgtgtacgctctttgactttctccctatccttttcctgcctggaagccaggatactttgtcatgccgccgtccacatagagcgtcaggcctgtgacatagcttgcctcttttgacgccagccagacaaacatgctgccacttcttccggctttccaatataaccaatggggatcaattcaatcacgccttttttcaatgcgggatcatcgaatttttccgcattgatcggggtatcgatggcgcctggtgcaatgctgtttacacggatttttttaggggcgtattctagtgccagcgtttctgtcagcagcttggcgccccctttacttgctgcataatggacgaaatgaggccaagggatttgctggtgaaccgacgacatattgatgatcgatccttctatcccgtgatctgtcatatacttcagtgcatcacggcagccgagaaacatacctgttaaattggtcgacattactttgttccaattatccagcgtcatttctgtggaaggcacttcattttcgatgcctgcgttattgatcatgacatcaagactgccaaatgtatcaacggctttatcaatcatcgcctgcatatcctcttcttttgagacatctcccttgattttcacagcctgtccgccatttttttgaatatccgcaatggtgtcatccggattttcttgatctgagaaataattgatcaccacattggctttttcttgtccaaaccggcgcgccatcgcttgccctattcctgtgccggctcctgtaatcaggactgtttttccttctaaatctggatacattcgtttaccctcctattttgtaaagcctagcagcacgccgcctgcaatgatcatcaagcagcctgcaatgacaaagcttgttctggatgctttctcttttaataagtaaatgccgcctaatgttgagatgacaatccctgtctgtgacatcgaaaaacttacggctacgccaatgagcggaatggccaaaagaagtccgagatttcctgtcgaccaaaccaaaccggcaatgatatttttaaacgtatatttactaaacgggttctgctttagactaatcgccaaggatgaaagcagcataccgaccgattgcggaacgagggcagaccacccatcaatatgaaaccatcttaaaatgacgacatatccgacatagccaaccgttgagatgagcagaataatgatcccttttttgaaattgcctccaccattcccgccgccattcttcttttgaccgagcgatgtcatcacaacacctgcaataatcagtaaaatggcgcatgaaccaatgagtatgaccgtcatcgtttgccattccttgaagaccatgacaccaaataaagtagtgctcacaagctgcatgcccgttgacaaaggaaccgccttcgagactccgagaaatgcaacacttgaaagctgattcatttgtccaatgctccaaaagatgcctgaaatcacggaaaccgcaaaaataagcggtgtcagctctggcattttgatgaagaaggctgcaattgaaaataaaaatgcgccaagcgtaatgccgagcgtttgctggtatgcattcccgccaagtttgacactgatcagaacaatacttccccaaaatattgctgggagaagtgcatataagatgcccacttctatccctactttcttttcttttttacatagcatccctctttttcgcatttttagccgaaaagatgcaaacacaaaaaaaccttaccaatccaatggtaaggtttttctgacgttctattttatttcatccattccgtatggaagacgccttctttatctgtgcgctcatacgtatgtgcaccgaaatagtcacgctgcgcttgaattaagttcgctggcaggacagctgtgcgatagctatcaaagtaagcaagtgcacttgagaatgaaggaacaggaactccttgctccactgcaagtgaaatgactttacgaagtgatgattgatagctttgagcaatatccttaaagtaaggatcaagcaataggtttttcagttcagggttacggtcatatgcttctttaatttgttgtaagaaggctgcacgaatgatacatccaccgcggaagatcatcgcaatttcaccgtattttaaatcccagttatattcatcagatgctgctttcatttgcgcaaaaccttgagcatacgagcagattttactcatgaatagggcttttctaacagcttcgatcagctcttgtttattctctgctgattgcgctggcttaggaccttcgattaattggcttgcttctacacgctcatctttcattgctgaaatatagcgcgcaaaaacagactcagtaatgattggaagcgggacacctagatcaagagaactttggctcgtccattttccagttcctttttgtccagctttatctaagatgacatccacaagcggctggtttgtttcttcatccacttttgtgaaaatatccgctgtaatttcgattaaatagctgtcaagctcgcctttattccactctgagaatacttcatgaagctcctctgctgacaagccagccacatgcttcaagataaagtatgattcagagatcaattgcatgtctccgtactcgatgccgttatggaccattttgacataatgtcctgctccatctgggccgatatacgttgtacatggctcgccatctactttcgcagagatcgcttctaaaattggtttcactagctcatgcgcttctttttgaccgcctggcatgatagatggaccttttagtgcaccttcttcaccgccagaaacacctgtaccaatgaagtggataccactttccgcaagctcttgattacgtctttgcgtatccttgtaatatgtatttccaccatcaattaagatgtcacctttctctaggtgaggaagtaatgattgaatggttgcatccgttgctgcaccagcttttaccattaaaagaattttacgcggtgtttcaagcgactgaacaaattcttcaatgctgtatgtgcctacaacgttttttccttttgattcttcgagaaactcttctgttttgctgctagatctgttataaacggacacggagaaaccgcggctttcaatattaagggcaaggtttttccccataacggctagtccaaccacaccgatttgttgttttgacataattctgacgtcccttctaacacactatattgattactgctaaaatgatgtaccctttgaaattaccacaacaccacctcttttatcaagttttcaggctagtcatttcctttttcgtcctgaaaaaagtctttattaaaacttgttccgcttgttttgctctctttttccttgatggtcattcctctttgaacgagtgatttgccatatttttctttcagcccttctaaaacggtttggagaggctcttcttttgcatcttctgtataggaaaataaatcaagctgtttaacagctgcttttcgttctacaaggtctgtccccgtcacacctaagagcctcacgggctggtcattccaatgtttaaggaataactgctttgctgcctcaaataagtcttcctttcgatccgttggattcgtgagtgtgacacttcgcgtgatatttttccagcttgcgtaccgtatcatgatgagaagccgatttgccatcacttcttttctccttaatcttgcactcacagattgtgacagcttatcaattaacgtgacaagttcatctggatcgtcagaatcatgaggaagggttgacgaattaccgacagatttaaattcgtatatcctttctgggtccacgataccgtcatgttcaccattcgccttttgttttaatctcggtccattgatgcccagtaattcctttagcgtatactcatttgctttcgctaaatcttcaatggtatgaatgccaatcgttttcaatttatctgccgttttctgtccaactccgtgcatgtcacccgctggcagcggccagagcatttggggcacatctcgtttacgtaaaatggtgatgcccattggttttttccaattagacgccattttcgctaaaaatttattcggtgcaatgccaatacttgaaggaagcatgagctcctctacaagcctcgtttgaatatcatgagccgttttcaccgcgtgctcggcatagggcgtatgcgttaaatcaatatagccctcatcaatggatacgggttcgactaaatcgctgtattctcttagtatcgtaaacatctcttgtgaggagctgcggtaccggtcaaagtttggtgtacggacaatcagccccggacaaagccgcttcgcttcccataacggcatcgggggctttacacctagtgctcttgcctcgtagctgcacgtcaccacaatccctttacgctctttcgcatttccgctaatggctaaaggtttccctctcaaagaaggatcatacgccatttcgacagatgcataaaaactattcatatcaatatgaaaaataattcgtcccttcctttgagaatcacccatttgcctgcctcctacatttattgactcttgttacttcatgtttgttccaatagacatttcatatagtgtatagtacactgtgagtaatgaaatggatgtgataatcatgattattgatacattcaatgaagtctttttccttgttgaattctttacgattattcttccagcgctgacggctatcggcattgcgtttttattaaaagactgccgtatgaacgaacacctcggtggacatcgtttggaagagtttgacgcatctttattgaaccgaacagactttctgtttatcatatatgatcgcattacaacttggattagtaaagtcattcgaatgaaacgatcatcaaatgatgatgaagaccattcgcttcctctctctaattaattttttaaaaaatgaggaggaaacgaattgaaacgtttattgacgatttgtacgactttatgtttaatgatgattgcctcacctgcttttgcagcgagtgggcaaacgaatgcgagctctgatgggtttttccatcactattttgtccagcctttttcggagctgatcatttggcttgcgaacttcttccatgatgattatggtttatcgattatgttcgtgaccttgatcgtccgcctgctgattttccctctttttgcgaaccaatttaagaaacaaagagtcatgcaggagaaaatggcactggtgaagcctcaaattgaccaaattcaaagcaaattgaagaaaacgaaagaacctgaaaaacaaaaagaactacaaatggaaatgatgaaagtatacaaagagaacaatgtgaacccgctggcaatgggctgtctgcctatgctgattcaaattccaattgttcttggcttttactcagcgatccgctcaacacctgagatcgcaacacattcgttcctatggtttaacttaggacaaaccgatctattggtcgcgatctttgcaggcgccatgtatttcttgcaattttatgttacgcaaagatttgcgaagcaatcaggcacccagacagaagctgcgctgaagcaagccaaagtcatgggcatgattttcccaatcatgatgctgtttatttcaatcaatgcacccgctgcccttcctttatactggatgacaagcggattactactcacaatccaaacaattattttgaatgtcatgtaccaaaaatcaaaatcgaaagctgaggcaaacgaccaagctagcccagctgctgaataaaaataatccccttatcatcagatagggggattttctttatgccaactcttcttttaaccgctctggcagttgatcgaggtcatcaattctcccaaggaacttattagggtccacttgtaaaatcatcttgttctctctctccacaacgccgaagaaatattcggaggctttcgtgttcatatgaaatggcttgatctcgcttagctcgatatcgataatatcttttgcatctgagacaagacagccaatcatttgatcgtttaattcaaatagcaacaccttggactgttcgttcacatcaagaggctttccgtgaagcatcacgcctgtgtcactgacaggaatgacttctcctcttaaagacatcagtcctttaatttcttttggaaggttcgatacttcttgtaaataagggaccttctcaatcgaacgaatatgctctacactgatgccaaaatcctcttgccccacttggaaaataatgatcttttgcgtgctcacagagtctcctgcctttacgatggatttgtcgtttcttcgataatggcgagaaccatttcagctgttttgactaattcttcaatcggcattttctcatttttcgtatgaatatcttcatatccaacagctaggttgacagttgggacgccgtttcctgcaatgacgtttgcatcactgcctccgccgctcgtctgtagttctgatggacggccaattttcgcagccgcttttttcgccacttctacgacttgatcgccgtgagagaatttgaagcctggatacatgatgtcaatttgtacatcggcacttccgcccatttctttagcggttttttcaaaggcttctttcatcttcgctacttgtgcttccatttttgcaggttctaaagagcgtgcttcagcaaggatatcgacttgatcgcacacaatattcgtttgcgttccaccttcaaaacgcccgatattcgccgttgtttcttcatcaattcggccaagcggcatgctggcaatggcttttgatgcaatggtaatcgcagacacgcctttttcaggtgccacacctgcgtgagctgtttttccgtaaatggttgcgcgtactttcgcctgtgttggcgcagctacgataattgtcccgaccttgccatctgaatcaagggcatagccgtatgctgctgtcatcaattttggatctaacgcttttgctccaacaagtcctgattcctcacctgctgtgatgacaaattcaatcgttccatgcggtaaattcttctctttcagcacgcggatggcttcaaacatagccgcaagccctgttttatcgtcagcaccaagaatggttgttccatctgtcttcacatagccgtcttcaatgactggttttacgccattgccgggaacaactgtgtccatatgagaagtgaaatagatagtatcagcctcttgattgccttccagtgtacagatgaggttgcctgcaccgtggccagttttcgcttttgagtcgtcttccaccactttaagaccaagctgcgagaatttttcttttaagacttccacaattttctcttcgtgttttgtttccgaatcgatctgaaccagttctaaaaattcgtctagtaaacgtttttcattgatcatgatgatgctcctcctcttatagcggcatgttgccatgcttttttaacggtctatcttcttccttcctgcgaagcaaatcaaatgagcgaatcaatcgctctctcgtttcagccggcatgataatatcgtctatcagccctgcctgagccgcttttaatacacttggctccgtctcaacctcgcgcgaagcaggatgaacgatttcgtctgcgaacgttttccccatgacatcaatttctgccgctggccatgcataaacaaagtcagcgcctaagcccttgctattcatcgcgacatatgcaccgccaaacgcctttcttaaaatcaccgtgatttttggaacggtcgcttcagcgtacgcatataaaagctttgcgccgtgacggataattcccgcatgctcggctttctcccctggtaaaaaaccagggacgtcgacaagcgttaagatcggaatatgaaacgcatcgcaaaatcgaataaacctggccgctttatcggcagcgtcaaggtcaaggcttcctgccaacacctttggctgattggcaactacgccaattggagccccttttaatctggcaaaccctgtgacgatattttttgagaaacaaggctgggtctcaaagaatgagcctggatcgatgatcgctgtcaccacttgtttgacatcataggtgcgtgatggatcctttggcaagattttgcctggatcaacggcgtcatgcttttgcacttcagtgtgcatgtcaggctgtttagtcgttggtatgtacgttaaaagtgttcgaaccgcctttaacacgtcctgctcatctttcccagtatagtgcacattcccgcttgtctgatgctgaacacttgcaccgccaagacggtcaggacagaccgtttctcctgttgccttttctattactttcggacctgttaaaaacatatgagctgtttgttctgtcatgaagacaaaatcagtcaaagcaggagaatagactgcacctccagcacatgagcctaaaataacggatatttgcgggatttgaccagagtacagcacattccgtttaaaaatctgtccgtatccttctaatgataccacaccctcttgaattctcgcaccacctgagtcttttagaccgatgaccggcatctgatttttagcagcgagatccattagagaagcaatttttttggcatgtatttcgcctaaagagcccccatgcactgttgcatcttgtgcataaacacatactggctttccatgaataagtcccgttccaatgacgacgccatcaccgacatgctctgacatgcggcctgttgcaaacctctgaatttccatgaaactgcccacgtcaagaagttcatgcagccgctgacgtaccgatagctttcctttgtttctgtgcgcggctgctcgtttttcaccgccgcccattaacgctttttcccgccatttagacaagtcattgaacgattcattcattgccatgtttttctcctttcaagggctcgcacaattcgaataacacaccagacgtttctttaggtgaaataaatgcaatctgcttgccgcttgcgcccttctgtgctgatttttggagaagctgcacgccaaggtgttcaagatggttaagatctgcctgaatgtctcctgactttaacgcaatatgatggagcccctctcctctttttgttaaaaaggtatgtagtttactgctgtctgacattggttcaattaattcaatgtgcacatgatcaagtgaagcgaaggacgctttaatctcctgctcaggaatctcttgtatgtctgaaaaatgccagttaaacagctgatgaagaagttgagatgtttgtttaatagaaaagaccgcaatggcaatatgatcgatttgattcatccgttcacttcctttgttgatcacttgtcgcatttgaaaaaaccagctagaataaagaaaggtgcgttcgtcgcaaaaaatcttcggttataggggtgcgatatgtctcagaaatttatgaaattcatggtattgctcatgattagcctgctgttaatttcttcacttttagcaggagcagcaacctttttataaggtttcaataaaagcagacaagcaggtgattcgttcaatcaacgaatggcctgtttgtctttggcaagcttttcaaatgaatcgcttgatgttgtaatccatacttttgttccaaccggaagctggtcaaatagaagctctacatcttgattatgaagtctcacacagcctgccgtgataaatttcccaatcgatgtttcgtcactcgtcccatgaattccgtacgttctgccatctgttcctcgtgcatcaaatccaatccaccttcggccaagagggttattcttcgcaccgccttcaatattcttttttctgtaatagggatctttcgctttgatcataatggtaaattccccttctggtgttaaatcggctgttttccctgtagaagcaggatatattttttggatttgtccttgatcaatataggcaagttcatttgtttgtttattaataatgacatacgggtctcctggaagcgggttttgtccgagcggccagataggtgaaagggacatggtcaatacggtataaaataaaagacgcataggctcctcctttttcattagattgaccaatgaaggaggaactcatgcgtctctattctttcatccctttaaaatagcttttcagtactaaatattgttccatttctccgaggaaatgaaaaagtgcagctcttgcctcaaactcttctcgtgtttgcggcagcggaagcttatcgaactcttctttcatatcaatgagacgtcttaaaaatttatgcgccgtgttccctgggtgaatatgtacgcgtaagtctctgacgtattcggcaatcatttgcccatgctctgttgtgatggaaatggacgtgattttcggaagcacacgctcaatgatttcgaattgcttttgcctcatattaaaataatgataatacaggttttcatgtcttaggacatggttttcaacatcacgatatgcgagagctttcgcttctttgatcaattgatgtgtctctggtatttcttttcctgtccagtcttgtttccctgtcattaagtattgctcgatttcctcaaagatttttgcaaagttggcttcaatctgttcgctgtagcgtttgagctttttatcgacacttggcatatacaagttcatgataagtgctacgccaacaccaattgttatcagcagcagctcattccagatgaggtgaagggtaatcccgccagacatgtataaatggagaatgatgactgaacttgtgacaatcccttctttaatgcggagcaaaacggttgtcggaataaagacaagcagcatcagaccaatcacaaaaggatgatacccaatcagatcgaaaaatagataagaaaataaaatggcaagactgcatgctgcaaagcgggctcccgatgctaagagggaccttttctttgtcacctgaatacacagaatcgtaataatcccggcagccgaataattttgaaggccgagcagttgtgcaatataaatggcgatcgctgttcctagtgctgttttcagcgttcggtagccgattttaaacatgatgtgattcactcttttctgtcttgtttccattcacttttgtgaaatgatgaactttttttactttccccattataatcaaaaaaagaaggagatgttaagtcgccttctcttttttctttataatattttttgtaagaagtcttgcgcgcgctgtgacgacggcgattcaaagaattgcacagggtttgcatcctctacaattttcccatcatccataaagatcacgcggtcagccacttcttttgcaaagcccatttcatgtgtgacgatcacaagtgtcattccagattgagcaagctctttcatgacctctaggacttccttgaccatttctggatctagtgcagaagttggttcgtcaaacagcatgatgtctggagtcatcgcaagcgcacgtgcaattgccacacgctgcttttgaccgcctgacaaacggttcggaaaatcatcttttttctctaaaagccctacctttttcagcagatcttcagcttgtttgatgctgtcttccttcgattgattcttcacattcattggcgcatacgtgatattttccagcacggttttatgcgggaacaggtggaaatgctgaaacaccattccgatgttctcacgcactttgagtgcattggtttttgggtttgtgatttcggtatcctgaattgtaatgacaccagaagtcggcttttcaagcaagttgatgcagcgaagaaacgtcgattttcctgaaccagatggtccaatgactgcgacaacttccccttctttaatggtggtgtcgatcccttttaatacttcatttttgccaaaagattttgtgagtttctctatgttaatcatttgattttaacttcctttccaccgatttgccgacaaaggtgagaacaagcacgatgacataatagatgagacccgcaaaaataagcggttcaagataattatacgtgacggcacctgcttgataggctcgtctcatgacatctcccagtccaataactgtcacaattgctgattcttttgtcagtgtaatcgtttcattcacaagtgcaggtgaaatatttttaaacgcctgcggaagcaataagtccttcatcattttagcataagggatgcctaaagcaacggctgcttctttttgacctttatcaatcgcattaataccagcacgaataatttcagatacgtatgccgcagagtttagtgaaaatgcggctacagcagcccagtattgatcgatttgaaacccgagaagctgaggcagaccaaaataaataatgagcaattgaagcacaagcggtgtgcctcggaagatggatgtataaaaatctgcaagccaaatgagcggcttaaatacactaattttgcaaagcgttaataaaatccctaagataaatccaagaaaaagtgataccacaacaatagaaagtgtgaccttaagcccttctaaaataaagggcatctgaggtattacatctttaaaatctaacatgacagtctccttttttatgccttcatacgaaatcaaaaaataaaacaggaaaaaagttcaacataagttgaacttttcagcgctttctactgaattttcatgaatgacgctgatccttttcctgacttatttttcatcagcaaaccattttttaattaatttatcaagttcgccattgtcttgcatttcttttaatgattgattaaatttagctgttaagtcgctatttttcttgaatgcaatggctgaaccttcgtttgaactattcaatccaaatgcttggaagtctttttcttttttcaaataaccagcagctactttatcttcaataatggctgcatcaaaacgacctgctttgatttcttgaatgatatcagagattttattacggtcttccacttttaagttatatttcttttgcaaaccgtttgcttcatcctgctggattgaacctaattgaacgccgactgttttatcttttaagtctttctctgttttcattccgctagatttctttgagacaactaagtttttagcattgtaataaacatcagagaaatctaattgtttttttcgtttttctgtaggggtcatgcctgcaaggacaatatcagctttatttgttttaagggctgatacaaggcttgcaaaatccatatcttgaatttctagcttgtagccgttctttttcgctagtgctgttgcaagatcgacatcaaaaccgacaattttatctccgtcttttgattcaaatggcggataatctgctgatgtcgccataacgagtgttttgtcatctcctgatgcgtttgaattattagaagaagttccgcaagctgcgagtgcagctgcaagaccagctgtcataagtaataataaccactttttcataagataatgcctcccagtatttaaaatcatgtattgttttgaatatttattcactataatgtattttaaacactttctttttaagatgcaatagtattttgctaaaattattttgattcaatggtcttataaaacaaaaagcagaccgatctaaagaccggactgctttatatttcatcattcaaacgtcacacgttaaatttcttcgcaatgctcatcgaatgcagcttgaagctttgacacgacttccattggctcgtgtccttcaatttcatgacgttcgaccattttaatgatctttccatcttttaataatgcaaaggatggtgaagatggcgggaagccttcaaagtattcacgggctcttgctgttgcctctttgtcttgtccagcaaacactgtcaacaattgatctggacgcttatcgtaatgaacagaatagcctgcagctggtcttgcaataccgccagcacatccgcatactgaattcaccatcacaagtgctgtgccttttttagacagtgcttcatctacctcttcagatgatgtaagctcagtatagcctgcctgtttgatctcttctctcgcttgtttcacaatatcattcataaataaattaaaatcaatattcattgtccgtccactcctttagcatgccaaaaccattttaacaacatcatatcaaggaaaacgcctgcgggcaaatgtgttgtcttttcatccccccactttttccgaacatcgtttatgagctgtcaaattggggaaaagtgatgataaagagatgaaagggagaactgcgtgatggcacaattcaaaaaagcgatgctcatttataatggaaatgctggacaaaaaaacatggaaaaaattctcggtcaaacagtacctcttctttctctacatattgatgaactcattcttaaaccaacaaaacagccaaatgatgcttatcaattctgtcgtgcaattgatgagacgatagaattgcttatcatattaggcggagatggaaccgtgcatgaatgcatgaatggcatcggcggtttagaaaaaaggccggctgtagcgatattaccaggcgggacatgcaatgacttttctcgaacgcttggtattccgcaacaaatgcaaaaagccgctcaaataattgtagacggcatagaaaagaaggtcgacttaatcaaagcaggagatcgatacttgttaaacttttggggcatcgggctgattgcagacacatccaacaatattaatgacaaggaaaaagctgtactcggcaaaatcagctacttcacaagtgccctgcgcaccttgcagcaaacagatccttttcacgtacgaattgaaacagaggaggaaagctgggaagaagaagccgtcatcgttcttgtcatgaatggacatttcatcgggacaaataaaattgatttgcccaatgcagcaattgatgatgggaaagcagaaatcttcatttgcagaaatacgagcttctctgctctaaaagaaatcttttctatgaaccgggaagaactggaggatttcaccggggacctctccctcattcaagcatccaatattcagatccatacaaaggaggaaatggatgctgatacagatggcgaagtgtatatgacagccccaacttctttagaagcgttaaaacagcatttgacctttattgttccagcagaataaagaaaacgcccgagatcattctttttcgggcgtttttttgatatagcgtctgtataaatattcaagtgcatagccaagcagcgtcccagcaagaagagaaattcctaaaaggctatttgctgctcctttaaatccaccgacaatcagcaagcaatacacaatttgaatcattgaaacgattgatatgatgagtagtaatctttcaggatgattgcgtgatttagaaatatatcgaagaaaagcgaacgcaattgctgtgataaacatgagcccaaccgttaaaaacgcaaaaaagtctaatccagacatatcaccgctcctttctcattatgtagaaatccccctctccatatcgggagggggacattcttgttttagtaaacagatgtctgctcgtcaatgccttcaaggatttgttttattcgttgaaggaatctgccgcatacaagaccatcaagtactctgtgatctaatgaaagacaaaggttgaccatgtctcttgctgcaatcatgccgtttacaatcattggacgcttcacgatcgattctacttgtaaaatcgccgcttgcgggtaattaatgattcccatggattgtatagaaccaaatgatcccgtgttgtttacagtaaaggtgccgccttccatgtcactttgcttcagcgttccttgtctcaccttggaagcaagctcatgaatttctttggcgatgcccttaatcgttttttcatccgcatccttaatgactggaacaaaaagagcgtcatcagtcgcaacagcaatcgagacattgattgctttcttttgaacaattttatctccagcccacatgctgttcatttctgggaattcctttaagccctgagccactgctttgacaaagaacgcaaagaacgtcaaattaaagccttcttttgctttaaattggtccttgagctgatttcttcttgtcacaaggtttgtcacatcgacttccatcatcgtccatgcgtgcggaatttcatgtttgcttctcagcatatttgccgcaatcgcctgcctaattggcgtgactggcagttcaacatcaccaggcattgtagagacggaaggggccgcttttggttttgatggctgcgcaggcttcggctttaccgcctgttcattaacaggtgctgccttctcttgtacgccgccgttttcaatgagctgaagtaaatcttttcttgtgattcgtccgcctgctccggttccttgaacagccgctaaatcaatgctgtgctcatctgctaaacgaaggactgctggagagtagcgtttcttttgactttgattctcttttgtttgatctgcttcaggtgcttcactttgctcaggtgccgcttcttctttcgcactctgctgcgagctgccttctacttccatttcacagaacacttctcctacttgcagcgtatcgccttcttcagccgatagctttgtaatcgttcctgtaaaagatgacgggacttctgcgttcactttatccgtcatgacttccgcaatcggatcgtatttattcacatgatcgccaggtgaaacgagccatttgctaatggttccttctgttacactttcacctagctgaggcattttcatttgttcaattgccacttgaaaccctcctctttcttaaaacgccgctagctctctcatttcagcttctaccttatctggattgaccatgaagaatttttccattggcggcgcataaggcattgccgggatttctggtccggctagacgtttgattggtgcgtctaaatcaaataagcaatgctccgaaatgatcgccgctacctcactcatgatgctgccctcttttgtatcttccgttagaagaagcactttgcctgtttttgatgccgcttcaataatggcttcctgatcgagcgggtacactgttctcaaatcgagaatatgcgcagaaatgccgtctttcgcaaggcggtctgctgcttgcagcgcaaaatggacacagaggccatatgtaatgaccgtgatatcatcgccttcacgtttcacatctgcttttccaatagggagtgtgtaatcctcctcaggtacttctcctttgatgagacggtaggcacgtttgtgttcaaagaacaatacaggatctggatcacgcaccgcagcctttaaaagaccttttacatcataaggtgtagaaggcatgacaatcttcaaaccaggctgattggcaaaaatcgcttcaaccgattgtgaatgataaagcgccccgtgtacaccgcccccgtaaggtgcgcggatgaccattggacagctccaatcgttatttgagcggtatctgattttcgcagcctctgaaatgatttggttgattgcaggcataatgaaatccgcaaattgcatctccgcaattgggcgcattccatacatcgcggccccaatacctacaccagcaatggctgattctgcaagaggtgtatccatgacgcgcgcctctccgaattgctcataaagacccgctgtcgctttaaatacgccgccctttttcccgacatcctctccgagcacaaacacttttggatctcgttccatttcttctttcatcgccagtgtaatggcgtctatatatgacataacaggcatttttcttcccccttactccgcatacacgtaacgaagtgcgctttctgcatcagcataagcagcgttttccgcttcatcagtcgcttcgtttacgatttgcatgatttcttttgtcatctcttctttcatttcagaagtcatgacgtttccttcgattaaatacgtttcatattggatgagcggatctttctttctcgcttcgagcacttcttctttttctcgatagcttgaatcatcatcatcacttgaatgcgcagttaaacggtaagagatcgtttcaatcaacgttggcccttcgcctcttgccgcacggtctctcgcttctttgacagcggcatatacttcaagcggatcattgccatcaacggttacaccaggcattccgtacccaattgcacgatctgaaatgcgttcacatgccacttgtttgtcatacggcacggaaatcgcgtacttattgttttcacacatgaaaataacaggcagcttatgcacagcagcgaagttagcgccttcgtggaaatcaccttggtttgaagagccctcaccgaacgtgacaaagctgacaaagtttttctgctccagacgtccagcaagtgcaatccccactgcatgaggaacctgcgttgtgacaggtgaagatcccgtcacaattcgatttgatttttgtccaaaatgacctggcatctgtcttccgcccgagtttggatcgtcttgttttgcgaaaccagacatcattaaatctttggctgtcatcccaaatgcgaggacaacccccatatcacggtagtaaggtaagacgtaatcctcttctctattgagagcaaaagcagcaccgacttgctgcgcttcctgcccttgacaagaaatcacgaatggaattttaccagaacggtttaaaagccacatccgttcatcaattttccttgctagaagcattgttctatatatatcaattgcttgttcatctgataatcctaattcctgatgacgcatgttactcatcctatttccctccttgattaaaaatggatcgccttcccgtcaacagcaagagctgcctcaccaatcgcctctgataaggttggatgcgggtggatcgtttgccccacttcccacggcgttgcatcaagtactttggctaatccagcttcagatatcatatctgttacatgaggaccaatcatatgaatccctaaaatatcatctgtcttttgatcggcaatgattttgacgaatccatcagattccccgtacacaagcgctttaccgatcgccataaatggaaattttcccattttcacttcgaagccttgctcttttgccgcctgttcagtgagtccaacactagcggtttctgggtgagagtagacacatttagatacgagcgtttcatcgagcggctttggatctttcccagccatatgttccacagcaatcatgccttcgtgtgaagccacatgtgccagctgaagcccgccaatgacatctcctattgcgtaaatatgcgattctttcgtttgataatgttcattcacgacaatgccttgtttttctgtttggatgtccgtgttttcaagaccaatgccttcaatatttggtactctgccgactgaaagaagaagtttttccgcttcaaacgtctgaatgtctccatccttttctgctagaatcgtcacgagattctcctgctttttgatggtatctggcagtactttcgcatttttcacaaaggtgatgccttttttagataaaagcttttccatttctttagaaatgtcatgatcctctgttggcaatatgcgatctgcaaattcaatcacagtcaccttcacaccaaaatcattgagcatggaagcccactcaattccgatcaccccgccgccgacaatgagcattgactgtggaagctctggcagttcaagtgcatcatctgatgaaagaatgtgcgtcccatctgcttcaagcccaggcagcacccgcggtcttgaacctgtcgcaataatgacctgctttggaatgagcatttcattttcatctccatttgccatttctacggagatggttcctggcattggcgaaaagatagatggaccaaggatacggccgatcccttcatagacatcaatttttccttgtttcattaagtgtttgacgccgcctgctagtttctctacaatctctgtttttcttttctgcacattggcaaattgcaaggcaatgccgtttgcctcaacgccaaaatcagcagcacgtttgacggtttgatagacttctgcacttctaagcagcgctttagacggaatgcatcctttatgcagacatgttccgccaagcttttctttttctacaactgctgttttcaatccaagctgtgaggcacggatggccgctacatagccgcctgtgcctccaccaagaatgacgaggtcatattcagttgccatgacttgtcactcctttcttcattcgttgatcatttgggtattctttcggtgattcttcttcttttaaaatacgaagtgcaccttctgctaaggattgcagttcattttcgcctggatacacgacaacatctgaaatccagtcaatgtatcctctaatacttgatgtaatttgtttgctgtacgcaagtccgcctgttaacacaatgacgtcaactgctccttttaagacagcactagccgcaccgatttccttggcaatttgatagcacatcgcttcataaatcagtgccgcccgttcatcgcctgcttcaatcatgcgctccactttcacagcatctgtcgtaccaaggtagcccgcaagtccgccttcaccaataatgcgtttcagcatttcctcttggctatactcaccagaaaagcaaagattgacgaggtcacctgttggcagggtccccgctcgctccgggctgaaaggtccttcgccatgcagtccgttattgacatcaatgacttttcctttttcatgtacaccaatggtgatgccgccgcccatatgcgtaataatcatgttcaaatcttcgtaacgcttcccaaaggatgcagccgtttttcttgcgactgctttttgatttaatgcatggaagatgctttttctttcaatcgttggcagccctgaaatacgagcaattggttttagctcatccaccacaactggatcgacaataaaagctgggatgttcaggccaagtgcaatttctcgtgcaatgataccgcccagatttgatgcatgctggccggcatatccttctttgaggtcttgggccatttgctcattgacttcatatgtgcctccttcgataggccggagaaggccgccgcgtgcgcacactgcatcaaacttcgagatgttcatcccttgttcatgcagcgttttcaggattgtttctttacgaaatgaaaattgatcaatgatatgtgggaattgctttaattcctcatctgtatgtctgagtgtcgtttcaaaaatagatcgttcattgtgaaacacaccgatttttgttgaagtagagccaggattaattgtgagaatacgccattcttttgtcagcaaaaacaaaacctccgtttcaactcattcttcaaattagcgacgacttaaaatatgttgaccattttgcaggaattggcttcttgatttgcgcattctttcaattcgctcctctgccaatcggtctgccgctttataagttggaatggcatcacggtttgaaatttcaatgacacgttcaatattttggtaaataccttccacttttttcatcgcacgatctgcattatagccataaagctcatcagcaacgttaatcacgccgcctgcattgatcacataatcaggtgcatagacaatgcccatttcatggataagatcgccgtgatgcgtttctctcagctggttattggctgcacctgcgatgacctttgctttcaacttaggaatcgttgcatcgttaatcgttgcaccaagtgcacatggtgcataaatatcacatgcttgatcataaatatcgtcagggtctactgcttttgcaccaaagtcttctacagctcgttttacagagtctttgttgatatctgtgacaatcagctttgcgccttcttcgtgcaggtgtttacacagattgtaggccacattcccaacaccttggacagcaattgtttttccttctaatgaatcggtcccaaatgcagctttggcagcagctttcatccctttatatacaccgtaagccgtaacaggagacggatttccggaagaaccaaatgcaggagaaatacctgtcacaaagtctgtttcttcatgaataagatccatgtcttctaccgttgtaccgacatcctccgctgtgatatagcggccattcaatccttgaatgtagcgtccaaacgcacggaacatttcttcatttttatcttttctcgggtcaccgatgatgactgttttcccgccgccaagattcaggcctgctgctgcgtttttataagtcatccctcttgctagacgtaacgcatcttcgatcgctgcttcttcgttttcatacgtccacattctcgtcccgcctagtgctggcccaagtgttgtatcatgaatagcaataatggcttttaagccagactgttcatcctgacaaaatacaagctgctcataatcgtatcgttccatatatttaaaaagttccattgtttattcctcctatgacttccgcttaatttgatgtacagatggcaagtgcaattgaataaagcttactttcagctgtatccgatcggcttgttaaggcaatcggcgccttcgctcctgccaccacagctcccacctttgcatgtgcaaagtagatgagagatttataaagaatgttccctgcttcaatcgttggcacaagcaaaatatctgcatgaccggcgacatcactcgtaatatttttatgagaagctgccgtttgagaaatggcattgtctaaagcaagaggtccatcaatgaggcagccagaaatttgacctcgcctattcatttgtgccagacttgccgctgtcaaagttgaatccattgccgggttcacgacctctaccgcagataacactgccacctttggcatgtcgtttccgacagcttgtgctacttgaacagcattgatcgtgatctctttgagcatatttaaatcgggcgcgatgttcatcgcagaatccgtgacataaataaaacgatcaaagcccggcacttcgaatgccgcgacatgtgataggacactcgctgtccgcagcccgtactctttattcagtaccgcttttaaaagaacggctgtcgggacatgccccttcatcaatatatctgcatgcttctcactcactgcctgcacggcaattttggctgattcttcaggagaatccgaatgaataatatctatccagtcctcattgatctcatgctgtttcaccagctccttcaggttgcgtttgttcccaaccagcaggaagcgagcgacctttcgttcaattgccatcttgatggcatgaagcacttcttcgtcttctgcatgagccacagcagcagttttattttgcagctgggcggctttcataatcagatcgtcaagcttcatatatgtccacctttccttatgctcggttcatggttttcatatgcaagttctgtgccagcttgaaatgcagcgacataaggcatttcgcatgaaatacatgcaattttttgcaggtaacatgcattttattgcatgctatcttttgcaagttgatatttatccattttatagtaaaggtttcgaatgctaatccctaacgttttcgctgttttcgtgcggttgaattgatgcttttcaagggtttgtttaatcagctgcgcttcaaatgcctcaacagcatccgaaagtgtctctccctcaaattgactgacagccagttcctgctgctctttttcttcctgctcttctgactccatgaaggaaatatgatcttcatcgatccattcttcttgcgggttcaaaaagatcatggctcgtccaaggacattttccagttctcttacgtttccaggccagctgtaggatcgaagtctatcgagcgccccttccgttaagccgctcacatttcgtccatagtctaaattgatcttctggatgagacgtttgcttaaggagtcaatatcttcaaggcgctgccttagcggcggaatagagatcggatatctgttcatgcgataatataagtcctctctgaactttccttccgccatcgctttttcaatattgacatttgttgcggtgatcacacgtacatcaacagggatggcttttgttccgcctactctgacaatttctttctcctgcatgacgcgtaataatttcgcttgtgtacttggcgtcatttcaccaatttcatccaaaaaaatactgccgtgatttgcctcttcaaacagcccttttttaccgccgcgccttgcaccagaaaatgctccttcctcgtagccaaaaagttctgactctaaaagggtttccgataaggccgcacagttgactcttacaaagcgattatatttccggtcactttcattgtgtatagcgtgcgcgaacagctctttcccagtacctgattctcccctgagtaaaatggtggctggtgtttttgcccctagctttgcctgctcaagtgccacaagcatttgctcactttctccaataatgtcttcaaatgtgtactttgcctcaagtgtccggatgagctgtcttgctttattcaattcattggtgagtgattgaatttctgatacgtcatgaatgacgccgacactgccttttagaatgccatcaacgatcactggcgctacgttgacgatcacatccttcttatttggtccgactttcattctaacgcctcgaaccggccttctcgtttcaagcaccttcaaatgcatgctttcgccttcagaaatatccgcacctgctggtttgcccacaacttctttgtctgttaaccccgtcattttcgtgtaagctcggttgattaaaattcctttcccctgctcatctacgacggatatcgcttcatccgatgattgaataatggcctcaagcattgtccgcacttctttgaggtttgtgacttcctccgcaagctccaccgcatctgtaatatctttgaagatcgataaagcgcccagcattcttcctgcgtcatcaataattggcaaacgcgttgtgacaatttgtatttgctgattcagaaattgtttttgattaaattcaggctccctcgatcttaaaatatcgggaagctttgtgtttggaatgacttcacgtatgtgacggccaatcgcatctttttgcgaacatccaaccattttggcagccgaccgattaaataggacgacttcttcatccatattaataaaaatcatgccatcgttcgttgcattaaaaatgcggtcatgtttataggtttgttcctttaatatttgaatgagctgatgcttttctgacattaattctgatatgacgtatgccatcgaactcggaacaatgacagcatgctctcgtttttctttcatcaattctttaagcacagctgaactgcccgttgtttcaatgatgatatcaatgtcatcttttatgtattctttccaatccgttgtcgtatcgattccattctttttcgcttctaccatccccggtgccccaagatcaaggtcggcgatcgcaacgatttgaatcatatttgttttcagcaatgtttcaagcaatattgatccaccgtgtcctgcaccgacaatcaagactctctgcatcccgttacccctttatatgaaaaaatttgcacaccatatttttccgttgcaaaaaattgcacaactcttatattaccacgttttcctttcttgacaaaatattttttgaattagacaatggaagtaaatgacgtttaaggggacatttgatggggagaatacttgcattagtgattattttaatacctggcgcgcttgctgcacttgggattaagctgctgcgtgacacggttttcggcatcatcattgcaccatttccatttttatggctgcaaggaattgcagggttattatttttaggaggaggtctttatgtagtcgctggctttattttatatagagaccgcaaacgcaataaagtgaccacccgctttaagcagagatagacatgaaaaaagacccgcttctgatagcaggtctttatttcatttcttctcttattttgacggctctgtcaggaaaatcagtgaaaattccatcgacacctaaggaaaacatgcttttcatctgcttttcactgtttaccgtaaacggcctgatcacttgctgagcggcacggagagccgacacgacttcttttgtcacccctgcgccctttatattcggatgataacctcttgcaggtactgtttttaagtacatctccggctgatgaatcacatccattgtgagaacagcaagctcaacatgcggcatcagcttgtgaaaaagagctaaactcccatgatgaaacgatgagacaagtacacgatcttctatttgaaagtgttcaatttgctcctttactttctcttcaataccaggatatcgataaatggaatttttcagttcaatattgatgatgagtgatgggtgctgcgtcactaactccaatacttcctctaaaagaggaatggatacagcaccggtttcttcatagaaagaatgactcgcatctcctgcttttaactcttcatatgtatggtctttcactaagcccttcatattcgttgttctgttcagcttctcatcgtgaatgacagcaagcttgccatctttcgtcagctgaacatcgagctcaattccgtcagctccagaatggagtgcatgctcaaaggctatcatggtattttcagggtagattcctttaaaacctctgtgtgcaaaaattttcgtcataggtcacctctaagtatgatgcttcctttcattatgacgtgtctcttttcgtttttccagtttgagcacataaaaaaacctcttctgattagtacgaagaggctcacaggtaaattcgatcacgtaatcgctctgatggcttgctctgtcgtctctgcgtcaagagcaaaaagggaagaaacaactgcgactgctgtaacgacggttacacctaacaacaactttttcataagataacctccactttcttttgaagtatttgtgcatcgaatttcttttcaagaaaacgaatggcgttttgatagtcatttcgttccttgaagtatttcgatatttgttcagacaaatcctcaagctccacatataatctatttttttctatgtagtctaatttttcagagaatacgtctgccgctccactattttcgcacatcaaatccaaaatttcaaattttactatatattcattattttggatatcgcagctatactgaataccctctttaatatattccttcgcctcttgatctcctagatgaaccaaggcatttgccagaacatataaagattggatgtaataatggctattgtcacggtgaatttgaatgcccatcccttttttggcatattgtgcgcttttttcataatcaggcttcgcataataaagaacggctaaattgtgatagcatttcccaatcagcacttcattgttaatgcgtttacttttctcaagtgcttcttggtatttttcttctgcttcttcaaattgaaacaaatcaatacaattacttgcatgtaaaatcaaactgtcaatcgcctgcgctgtatactcttcatgcgctttgaacgtatcgatggcttttttaatatgattaatggatatgaaattttgtttcagttcgtaatagattgaagcaaccttatggtgaaaagttcctacttccaggtcttcattcacacgttttaggcgctgttctgcaattttgtaaaaactgatggcttcatcatactttttcacatatgcagcatattggcctttgtaaaagtaaaaataaaaattaataatgtcatctgctttctcatcgagcgttccgacactcttcataatgtgattggctttttcaatatttccaagtaacatttcatgtctgccattaacaagctgataataaaggagaacttcacggtcttcatctgtattttttagcaaattctgaattttctctttatagacagcagatttttctaggtcattctgagaaatgaccctcgtccacttgctaatttcgttcgctacctcagcagagtggattttcagctttcccataacctcaccctcttcttctcattattatagcatagtaaaagaatgtgaaaattattaaattcgacaatgggaatattcagttcaaatggcacaatctctaagaagccagtgactttaaaacgccaaccaatcaggtcaatagaaatagaactttcgatctcatttgctttatttaccaaatccatcagaccttttcctctcatccttttccttacgaatgagctttttcttcttctatttgaagaccaaacaattgattggcgtagctgattaccactaatgtatgacatacccatttctttcatgctttatttttcattttattccgaaaataaagcaagccgagttgtccaaatgaaacaataagatgattgtatcaatacaaccaatttttaacaatatttttcgaaataaaaaaacgcctctttgcagaaacgtttttttaagagaatgaactagctagctctatgctctaagcgcagacgatcagccaccatagcaataaactcagaattggttggtttcgctttagacatgctgactgtataaccaaagagtgaggaaatggaatcgatgtttcctctgctccaagcaacttcaatcgcatgacgaatcgctcgttctaccctgctggcagtcgtgttaaatttcttcgcgatgtctgggtacaacacttttgtgatgcttccgagaagctcaatgtcattgtacaccatcgaaatcgcttctcttaagtataaatatcctttaatatgagcgggtacgccaatctcatgaataatcgtcgtaatgctcgcatctaagtttttacgtttcggttcaggtttgttccgaaggacactgttttggatagatgaagatcgatgtgtgacttgtgtgccgtttccactgacttgacgaatatgaccgactaggttttccatatcaaatggctttaagatgaaataggatgcgcccaaatcaactgcttttttcgtgacatcttcttgtccaaacgccgttagcataatcacacttggctgtttggtcatgtcattgttttcacggaggcgttccagtacagcaagaccgtctaaatgaggcatgataatatctaagaggagaacgtcgggctctttatctttaaataatgtcagacattcctgaccattatacgccacgccaagtacttccatatcttcctgtccctcaatatactctgtcaaaaggccaacaagctctcgattgtcatcagctacacacactttaattttctccacgttctttcctccccaatgtcgattcctttagtcttttgcatttctcttctgagtgttcaattcgacaaaaccatgctatcccctttaaaaaactttaattttccgaataatagagcattatctagctttttctacgtttttcttaacgaatcgacgattattgcaatttgacaacatactattttccattttgtcgaaaaatctctttttccttattttataacatgatggcagagaaagaaaggggagaaaaaaactgccgggagattcgcggcagtttgatgatcagcttgcttttttgtttttttgataaagatcgattcctgcttctgacagcatccattcaatgtgtacgccgtacccgcttgtcggatcattgacaaatacgtgtgtgaccgctccaatgacctttccgttttggatgatggggcttccgctcatgccttggacgataccgcccgttttacttaaaagacgttcatctgttatcttcaataccatcccttttgttgccgggaatttctgcggtgtcgtgctgacgattttaatatcaaacttctccactttatcatgatccacaacggttaaaatttctgctggaccttcttttacttcatttgataaagcgactggaagcggtttgtctgatacatgattttcaagcttttcggttaacgtaccaaagataccaaatgggctgttgcgggagatatcccctatcgtttttcgttcggaagagaatctcgccaatttttctccagggttgcctcctgtgcctttttcaattgatgtcacggttgatctgacaatttcaccattgttgacaacgattggtttttttgtatccatgtcagaaatcacatgcccaagggcaccatattttttagaagatggttcaaagaaggtcatcgtgccgattcctgctgcggaatctcgaatgtaaagaccaattcgataggtgccttcacttgcatcttttgcgggtgttaatgttgtttgaaaggttttatggtctctttttatgagtaaacgaagcgtttcacctgtttttcctgctttctggataaatggggtgaggtcattcattttctccatcttttgaccattgatttcaatgatcatatcccctgattgaatgcctgcggcttcgcctggtgattttttgccgtctgctgttgtgatttgatgaaaacctacaacgagaactcctacagagtggagcttgacgccaatggattgtcctccaggaactacttttaattcagggagaacgtcgacttttgttttcttaataggaaatcctttaaaatcataaacaatttcggcttttcccgccttttgtcctgtcacttcaagctgattctttttctctgaaagactaaaggcttgtgaagaagcattggctgacgcttctattgatgtgtcaattgagtgcttctgtttttcaaatacagcaacatttgttggaatgctgatgtattccttcactatgctcataaaccctgtacttattaaagaaacaaggagaatcacaccaatggcttttctcatcttttcgggcattcatttttcactctcctcgctccttacccacaccagaacactcatgttttggctacatctttacttttgccttcttcgctaggatttataaccggcacctatagaaaatgattggataaattgataaaagaaaaagacgatttcacgggtatatacagcgattttgacacaatataaaaaaggcagctgatttttcagctaccctgttgttttgacatcatttgcttgatgaagcaattcttttgcgtgctgttttgtcagctcagtgacttccacacccgcaatcatcctgccaatttcactcactttttcttcatgacttaatggtttgacgcttgtcagtgttctgccggctttagagcgtttagaaatgaagagatgcgtgtcagccattgctgctacttgcgggaggtgcgtaatgcagagcacttgtgagccagccgccactttgtaaattttttcggcaatcgcctgtgccactctgccgcttacgcccgtatccacctcatcgaaaataatggacgtgacttcttgtttggctgagaaaatacttttcacggcgagcatgacacgtgaaatttctccacccgaggcaacttttgataaagatttcatcggttcgccaggattagtagagatcacaaattgagcttggtcgattccgttttttccaagctggacgggctttccatctagcagcggattatccgtgctgctaaaaggcgcataccgaatggaaaaggatgtatcaaacgttgacttctccatatacaaatcttttagttctgtttgaatttgcttcgctagttttttcgcccattttttacgaagctctgaaacgttaagtgcttcaagcagggcatcacggctcattgcatccagtttgtttttaagcgtctgcaggtggctgtctcgattttgaatttgatctatttcttcttctatcttcgccgcatactccaaaatttcctcaaccgttgtcccatattttcgttttaactgcttcatttcattcagcctagattcaataaaatcaagacgtgctgggtcgaactctaattgatccaacatgcttcgcatttggaacgtcgaatcctctaataagtaataggagttcgacacttgttcggatagctttttcagatcgtcgttgatctcagaaacctgctcgagctcgcttgatgacatgccaacccaatcaagtcctccctgctcattgcgcaaggcattatatgcgttttgaagtgaggaaaagattttttcgtagttgctgatctgatggcgctcttcttgaagcttctcatcttctcccggctctaattgtgccgcttcaatctcctctagctgaaattgcagtaaatctaaccggtgcaccatctcttgctcattctcagagagctgttttagcttttgggctgtctttgtatattgctcatatgcttcttgatattgtgacaaagcaggtgcaatttcttctgctccaaattgatcgagcaaatgcagatgattttcatcctccatcaataactggttatcgtgctgcccatgtatatcgagcaaaaggcgtcctacctcgcgtaaaagtgagatcgtgacaagtttgccattgatgcggcagatgctttttccgttattgttaatatcacggcgaagaatcatcatttcatccgatgcgtcaattccctgctcttcgcataaagcaaatacagggtgatcggctggcacaagaaaaagcccctccagctctgcctttttttcaccataacgaacaaattcagacgaccctctccctcctacaagaagtgagactgcgtcaatcatgatggattttccagcacctgtttcccctgttaggactgtgagtcctttttcaaacgaaaccgttaactcttcaatgattgcaaagtttttaatggttagttctgctaacactcatttgacacctctttttgtaaacctgattctttatagaagctctaaaattttgctcgaaactgtctccgtatcatctggtgtgcggcaaatgatcaaaatggtatcatctccgcaaatggttcccatgatttcttcccaatctaaattatccattaaagccccaatggcctgagcattaccgggcatggttttgaggacgattaaatgactggcagcatccattttgataaatgcatccattaaggatcgcttcagtttagacagcgggttaaaccgctgatccgcaggaagactgtatttatatgttccattgttcgtcggcactttcactaaatgtaattctttaatatctcttgaaacggtcgcttgtgtgatgttatatccatcggcttttaaaatatcgactagttcatcctgtgtttcaatctcttggcccgcaatgatttccctaatcttaatatgcctttgacctttattcatgtttgacccccctaggcgtttgatctcagtttgtctttacgttctatgttatatgaaccacagttcaaaaaacaagcattacgtgagaatcggtcaattctcgtcttttgaccatgtaaaaaggaataatagcgagctattattccttttgtttcgatgatctcatgtgtcagccggctcagggctgtttttcttttctttcaatacagaatgggcttccttgacgaccttttcaagctctgaagccggaagtgccgcattctcttcttgatcggaatgaagcactaaatgaagaaggaactcaatattcccgtctccaccagtaataggcgaaaatgatacatcctttacatcatagccttcttttgcagcaaactgattcatctcttccagtacaccgaggtggacggacggatctcgcacaatgccttttttcccaacaagctctctgcctgcttcaaattgaggcttgacgagtgcaatacagtctccgcctgggacaagaatgtgctttaaagccggcaggatgagtttaagtgaaataaaagagacatcaattgatgctacttctggcaacccttcagtaaaatctgctgggacggagtgacggaaattggtgcgctccatgacgattaccctgtcatcctgccttaatttccacgcaagctgattgtagccaacatcaacagcatatgatttgaccgctccattttgaagagcacaatctgtaaatccgcctgttgatgaaccaatatcgattagcaatttcccttcaacggttaagtcgaattctttgagtgctttttcgagctttaacccgccgcggctcacatatttcagagggttccccttcacagtgagcggagtatcacgagcgattttctctcctggtttatccaaacggttttcatttgagtaaacgatccctgccatgatggcacgctttgctttctctctcgtttccattagtccttgttcgactaataaaacgtcaagtcgttctttctttgatgtcatgatccaattccttttcttggtgctgcgggaagcaggtcacgtaaagagtcagcaacgtgtgctttcgtcagaccaatttcttcaagcagggcatcaacacttccatgctcaataaattcatctggaatgcccatacgctctactttgatatgagatgctttcttatcgtgtatatattctaagacgctgctgccaaatccgccttggagcacagcttcttcaatcgttaaaatcggaataccttcagaaagaatgtcatttaacatcgcttcatcaagaggcttaataaaacgagcattgacgacacgaattgatttcccttctttttgaagttcttctgctgcttgaagcgccattttaatcgtcgtaccaaatgttaaaatgacagcgtccttccctggacgaagaacctcccaggacccaatcggaatggttttcagctgttcatccattttcacgcccagcccattaccgcgcgggaaacgcatagcaataggaccgtcatcgtactgaatggctgtattgaccatgtgctgtccttcattttcatcttttggcatcataagtaccatattcggcatatgacgcataaaggaaatatcaaacacaccttgatgggtttctccatctgcaccgacaagtcccgcacgatcaatgccaataaatacgttgaggttctgacggcaaatatcgtgcagcacttggtcataggctctttgcaggaacgttgaataaatcgctaaaaatggcttcatgtcctgcgtcgcaagcccagctgccattgtggctgcatgctgttcggcaattcctacatcaaacatccgctctggaaattccttcgcaaagccttcaagctttgaaccaacaggcatcgcaggcgtgatcgcaacaatccgctcatcttcccgcgccagctttctgaccgtttcactgacgagaccactccaagacggagctgctgctgccggttttacaaaatcaccggtatcgattttgtatggaccagtaccgtgccaagtcccgattttatcggattctgccggttgatagccttttccttttttcgtaatgacatgcagaagaactggaccttttgttttctttgcatattcaagattttcaaaaagatcttcatacgaatgtccgtctacaggacctaagtaagtaaatcccatttcctcaaaaaacatgccagatacaagtaaatatttgaggctgtctttgatacgctctgctgtggcagcaagctttccgcctacagctggaatgcgcttgaataaatattcgagctcgtcctttacccattggtatttgcctgctgtacgtaatctgccaagcattgtgtgaatcgcaccaacgtttggtgcaatactcatttcattgtcgtttaatatgacaatcatatctttcttttcatcaccgatatgattcaaagcttccagcgccatccctccggttagtgcaccgtctccgataatcggcaggatatattcatctgtccctttaatatcacgcgctgccgccatacccatcgcaccagataacgaggttgaactgtgacctgtctcccaaacgtcatgttcgctttcatttcgtttaggaaaaccgcaaagccctttatattgacgaagtgtatcaaactccgaccctcttcccgttaacagcttatgaacgtaagactgatgtccaacatcccagaggaatttgtcttttgggctgtcaaatactttatgaagcgcaacagtcagttcaacgactcccaggttcggaccgatatgcccgccagagttagctaaggactcaattaaaaacatgcgaatgtcagcgctaagctcctctaattctgcatttgacattccttttagaaacgttggattttttattgataaaagatccaattaggatcaactcgctttcaacaaaatttctatatacagctataatgccttattcctttgaaaaccaatagggaataagagttgtctcatcataataaactgtttacagtttaccacaattgctcgaggaccctcaaatctaggctgtttttaatgatctcttgaggcaattagatcacttaaatcatgcagcaattgctgctctaattgaagatttgagacaatttcttttgcacgtgtgatgtgctcatgcagtttttcttttgctcctgaaagcgttaataaagaaggatatgtcgacttttcatttgctgtatcagagccgacccgtttgccgattttttcttcgtttccttcaagatctaaaatgtcatcacggatttgaaacgcaatgccaatatgatagctgaattcccttagcttttcgatatcgtcatctgatgctcctgccagcattgcacctgccgcgacgctgaacgtaagaagctttcctgttttacgggcgtgaatggattctagttcagcaagcgatacttgtttttgctctgcttccatgtcgtcaaattgaccgccaaccattcctagtgcacctgctgactttacaagctcctctacaattctgagctttttgtcagctgagacgctgctagacagctgtgatgtaatcaggcggaagctttctgttaaaagggcatcacctgcgagaaccgctgttgcttctccgtacactttatgatttgtcggtattcctctgcgaaggtcatcgtcgtccatgcaaggaaggtcgtcatgtatcaatgaatacgtatgaatcatctcaactgcacagccgacaggtataccgtcttcttcgtttttaccgtaggcatgtaatagagcaagaacgagaacaggtcgaagccttttcccgcccgctttaagagaatagagcatagaagatttcaggtcttctggaatcgtcaattcctgaacatatgtaaataaataatcttcaatggcctgttttcgtgttgttaaaaattcatttaaattacttgtcaccagcatctgcctccttcactgagaagggagccagctcaccgtcctcttttaaaatgaaatccatttgcttttcaacatgctgtaatttttcatgacaaagcttcgaaagggtcatgccttcttggaaataatgaatggcctgctcaagtggtacatctccttcctcgagctttcccacaatctcctcaagacctttcatcgcctcttcaaatgtcatttgttcttctttttgtttattggattctgtcatgatgattgcccctccttctcaataacctcacaaatcagacgtccatctttcatcgtgatagtcagctgatccttcgtctctacttggttcacactttttatcagttcttcttctttataggctaagctgtagcctctttccatcacttgaagtggatttaatgcatttagtttaccaagaaccgattggaactgcgaatgaattgttttcatttgcacattcatactgcggatgagctgttctgattcattggcgtggcgttttttcgcctgaagcagctgctctttaggatgaagcggcttcagcctgtatgtttgtctgtctagttgactgcgtttttgctcaatttgtctcgtcagctgtttttgaaaacggtcaaataccaaatcaaattgctgctctttttgctcctgtaatcgttttggaaaacggaaggcatacgaggattgcagcgccacaagacggtctttcgcttgtgaggtttgattctttaccgctcttgtcagccgtatatcgattgatttgattcgttcaattaaatcggtcgtgcttggaacagcaagttcggctgctcctgttggtgtgggtgctctcatgtctgcagtgaaatcactgatcgtaaagtctgtttcgtgcccaactgcagatatgattggaatgtctgatgcgaagatggcccttgcgacagcttcttcattaaaagcccaaagctcttcaatcgaaccgcctcctcttccgacaatcaagacatcacagagctgtttttcattcgcttccttgatccgctctacgatggaacgggtcgcatgttcaccttggacaagcgccggaagcacaatgattttcgcctgctgatagcgccggttgatggtcgtaatgacatctcgaacagccgctcctgttggagatgtaatcacaccaacaacctctggatattcaggaatcatttttttatagcgcgcatcaaataagccttcacttgccagctttttcttcagctcttcataagcaagatgaagagcaccaacaccatcaggctgcatttcttttgcatataattgatagttgccgcttggttcatatacttgaatcccgccgcgtacaaacaccttcattccgctcttaggagagaaaggcagcttagacgcagagcgctggaacatgacagcttgcatgcgtgcgttttcgtcttttaaggtgaagtacacatgtcctcttgaatgaatctttacattggatagctcacctttgatccaaatatcttctaaatgcggatcaacatcaaattttctttttatgtattttgtaagggctgtgaccgtcacaaaggctttttcactcatgacgtattcctcctcttcaaaaacgcacattcatccaccagcagcatgcaggtggatgaatggataaagcttatgctaatgtacgttttgctgatttaaccgtattgtgtgcaagcatcgtaatcgtcattggaccgactccgccagggactggtgtgatataagaagctttttcttttgcctcttcaaaatcaacatctccaacaagcttcccagtatctaaacgattgactcctacatcaataacaatagcgccttctttaatttggtcagctttaataaagtttgctcgaccgacggcaacaactaaaatgtccgctttcaacgtatgttctgaaatattcactgttcttgaatggcaataagtaaccgttgcgttttcgtttaacagcaattgccctactggtttaccgacaatattgctgcgtcccacaacaacgacttcttttccagaaagattaacacccgttttgtttagtaattcaacaatgcctgctggtgtacatggaaggaatgtgtcctccccaagcagcattttcccgatattcaatggatggaaaccatcaacatctttttcaggtgaaatacgttcaataacggctttttcagaaatatgttttggcagtggaagctgaacaagaatcccgtggaattggtcgttcgcattgtactgatcaatcagctgaagcaattcttcttctgttaaagaagcatctaaatggtcaagctggaaatgcatccccattgcttctgctgctttcttcttcccgcgcacgtaagaaagtgaagccggatcatcaccgattagaataacggcaagaccaggtgtgacacctttttgttttagctcttctacttcttttgctaattgctcacgcttttcttttgctgtttctttcccatcgatgattgttgctgtcatgtcgaatcctcctattgctgctttaggtcgtttttaatgtttgaaagtacaccatttacaaatttcggtgctttatcatcaccgaataatttggccaattcaatcgcttcattcatcgaaacactaagcgggatatcttcttgatacaccatctcgtacacagacagccttaaaatggctctgtctacgtttgcaatacgatcgagtttccaattcactagatgctgtgaaatcatgtcatcgagcttgtccttttgttcaagcacaccgaaaaccagttcctcgaaaaaaggatctgattcttgttcatccagcgcatgtgtaatggcctctttcggatcaatattgctcacatcaatttgaaataatgtttgtagcgccttttctcttgcagttcttcttttcattatttactcctttaaccactttatccgcttgtcgttaagccatacagagatcataacatattttgcccgtggtcgcaccaagatccatgcgagctgtgacgaaaaacgaatcaatcaacgcgtgagatcattattattcggaaatgacccaaaaatgggctttaaaaaaccaaagaggcaatgcctccttggtttcacttgaactctttttttacatttcttgatctacttcagcctcagatgctttagtatcaaattgaataccaacgacatgaatattgatttcattaatcgtcaaggcagtcatgttcaaaagagtttgacggatattttcttggacagcagtggatacctttggaatggataggccaaattgaaccacacagtatacatcgattgtgatgccttcatcagagacatctactttcacacctttacggtgatttttcttaccaaagcgttctgctacatcagcagcgaaattgccgcgcatttcggcaatgccttcgacttctgaagcggcgatcccagcaatgacctcaatcacttctggtgcaatttgcacttttcccaattgatcttcatcaaggttcatttcaagcaaattgttttctgacacgatcattcacctccgaaagctatgattatttcatgatttggtatgtttctaaaaacttcgtattaaaattaccgctcacaaatgtttcatgctcaagcaatcttagatggaatgggatcgttgtgtagactccttcaatgacgaattcttgaagcgcgcgtttcattctcgcaatcgcttcttctctcgtcttaccatatgtgatcacctttgcaatcatactatcgtaatatggcggaatcacatagcccggataagcggcagaatcaacacgtactcctagaccgcctggcggaagatacattttaatttcaccagctgatggcatgaagtttttctctgggttctctgcattaatacggcattcgatcgcccatcctgcatatacgacatcctcttgtgtaagagaaagtttttcacctgatgcaactttaatttgttctttgatcaagtcaacacctgtgaccatttctgttacaggatgctctacttgaatacgggtattcatttccatgaagtagaatttctcttcattataatcataaatgaattcgactgttccagcaccagtgtattcaacagcttctgctgcttttacggctgcttcacccatttgctcacggatgtctgcattcagcgctggtgatggcgtttcttcaagaagcttttgcattcttctttggatcgagcaatcacgctctcctaagtgaatggtatggccatgctgatctgcaagcacttggatttccacgtgtctaaagtcttcaatgaacttctctaaatagacgccagggttaccaaagttttgcgctgcttcctgctgcgtgatggtaacaccattaatgagctcttcttcggtacgagccacacggattcctttaccgcctccgccggcagttgctttaataatgacaggatacccaatacttgctgctgttgaaacagcatcatcaagatcttttacaattccttgagaaccaggaacaatcggaaccccggcatctttcattgtttcccttgcgacatctttcgttcccattttggaaatcgctgacgcagttggaccaacaaagatgacattgcattcctcgcaaagctctgcaaagtctgcattttcagcaaggaagccgtatcctggatggatggcatctgtccctgttaattttgctacactgacaatattcgtgacatttaaataactatcttttgaagcagtcggtccgatgcaatatgcttcatcagccatttgaacatgaagcgcatcgcgatccgcttcagaaaataccgcaactgtttcaattccaagctctttacaagcgcggataattctaactgcgatttctcctctgtttgcaattaatagctttttaatcatgatcgtactccttactctgctttcactagaaagaggggttgtccgaattctacaagctgaccgttctcagctaatacttcgacgatttcaccttttacttctgcttcgatttcattaaacagtttcatcgcttctacgatgcacacaactgtgttttccttcaccttagaacctgttgtcacgtatggacctgcttctggtgaagatgaagcataaaatgtgccaaccattggggatgtgattttatgcagattttcagacgcagctgcctcttgtgcaggggcttcggtctgagctggagcttgtgctttaggagcttgttgagctggagctgcttggacaggagccactggtgccgcaacttgctgaacgacttctttatttttcttcagtttgatttttgcaccttcgttttcgtacgtaaattcatcaattgtagattcgtcaattaatttaatcagttcatgaatttcttcaatttttaacatggatttgcacccctatgtatggatttatctttttcttataggctagtactaaaagtacatactataaccatcttacaggaggatttcaatgaattcaactactattgtggcgaagcgcctcgcgaaagcaccttggagagggcgccaaaccgcatcaaaaaacgcccttttcggcaagggcgcctgttcattttttattgattggagggctcaaaagtgacagctacgttatcaagacctctcatttcttttgtgaccatatcaataatatcggccgcttgggactttgattttttgtcagaacgaaccgtgatgctcactttatctccttcagcactcactagcgcatctttatatccttttgttttaattaaggtttcgagctgacgctccgtcccttctgcctcactaagcgctgtcatttgatcatacgcttcacttttttcttgtgctgttgcatcatcactggatacgatttcgttgaactcttcgcgctgtttgcttcgtttatcttcaagctctaatctgtatgttgtaaaaagctcatcgtctgtttgctccgacacagcctttccttcttcaccgcttgtttcgatatcctcttgtttgccatttgtttctttgtcagtggacttctcatcagtgcctttttccgttcctttgtccgtccctttttctgtttcagtctttttctcttccgttccttttgatttcatatcttctactgtcactgcattttcaccttgtggagacatgatatagtacacacttaagacgacaactaaacttagcatcgttaatagccaaaccgtttgtttttttaacatcattccgaatcctccttgatttttttaggggcaacagccactctatggctcggtacatcaagcactcgtgtaaccgcttcaatgatggttttctttatttgaacgttgtctactccttgagcaacaacgaggacaccgcgaatatctggttttttcgtttgaaccactacaggtgtttcttcattgccatttttgatgatgacaatttcttcttcttttgtttgatcagtgacacttcgtacgccaccttctttatctgtttcctcggtcgttgtgcttttattggatttgtttttttcaaacacttttaaagaagttgcgtctacattgaccacaatcgatacatcctcaacgccaatgatggtctctaaaatttctttcagctgattttcgtattcttgctccacatcctcaatcgaattctttgatttacttgacgatgccggcttgaatacctcctgctcttgtgaggatgtttttttagaagcaggaacagcagcctgttctttgcttgatggcggtgacaagatctgactgactaacatgaaagatacgccgatgatgaatacaagcagcaagtaatggtgcttcgttaattttggtttcccttcacctttttcaggcggctgcaagaatgatttcagcttttgtttccagtccttgttattcatgatctgctgcgtcacctccctcaatgttcagcgcaatgtgctcaggactcgtattccaaacatcagcaagtgtctctttcaacctcgtgatctctttgctagaagattcagcgctttcctccttttgcgtggagagatcaatgtccacctttgccaccgtttctacagcatcacctgtgagcggggaaagaactgctttgatgcgaaattgatccgcctccatattctgatccaggtgctcctcatctgccagcacttctacgtgtttcatttcatagctctccttctccagtggctcctttgcgcttttttctagttggacagccatttgctttaaaatatatgcacgctgagaggcttgtatttcttttttttctaaattcatctgattttttatttcttctgactgtgcttcttccttccccttcatcaattccgaaaaaatttggtcagggtctgcccgaaataaagcaaagatcggattgagcatcaccacaatcaatagcaggctgacgaccattttggcatacttttgcatgcttgaattgggaagcagaagatcaatgacaatcgcaaataagataaagagaataatacttgtgatccattccgtgagaaaactcaaaaggtgtccctccttacttcatcatcatggtcaagttgccagcagtgataatgacggtaatgcttaaaaagaacatgagcgacacgacagcaagtgcggcaaagatataaagaacactttttgaaatgacatcaagacagctgatgatcggtccgcctcctaatggctgaagaatggctgcggcaagcttatatataagggctagtgagagcactttaatcgccgggaaggcggcaattgaaatgagaatggcgacgccaacaagtccgaccgtatttttgagtaacacagaggcactgatcacggtatccgtcgcatctgtaaacattctgccaaggacagggatgaaatttccggtaataaatttggctgtacgaagagcgattccatccgtaattgcagcagatgcaccttgcacagaaatgacgccaagaaagacagttaaaaaaacggctaacccacctatcgccacatttcttaacagctgggcaagctgggtgaccttgtattgttcggtcagcgtactgacaatgctcaatatcgcagataaaaagataaggggaagaacgacatattgaataaaaacgccgctcgtattcatcaaaaataaaataacgggatgaaagaatccggctgagacaagcccgcctgatgaagcaataagtgctaataaaagaggaataagagcaagaataaaactggtcatcgtttgaatggcttctgttgcataagaaatcgccacatgaaagctgttgagtgcaataatgatcagcaccatataaacaagagcgtatgcgactttactgacggtgctttgctcaaacgcattctgcaaaagctgcaaaagcgaacaaaagatggtgagtaaaatcagtgtacctaggagctttccgtttgctatgacctcgtgaaaaagataatgaacaaaggctttcagccatgtttggggagacagctctttatcgccatcaatcatttccttcactgtgcctttttggctttctggcagaaagccgccatactcgtccaatatggtttcccaaaagtcattgatggattgaagctctagtgcatcagcctgtccattcgccacttcttctgctgctggttcttcatttgataaaggtactttctcttctgcacctgcatgcggagcgatcagccagaagaaaagcatcagtcccataacagctgtcacccgtttcattgtcatcacctcttttcaattacgtcatggacgggatcatacctaagatggtctcaatgatgactgttaaaatagggactgccatgaccaagatgagaattttgccgccaagctctatttttgatgcaatggcgccttgtccagcatcttttgtcagctgggcgccgaattctgcaatataggcaatgccaataatttttaaaatggtttcaacatacttcatattgacgccggcgcttgccgcaattttttcaatcatcgagataatggcatagatttgatcaattaaataaagaaaaatcacacatcctgtaaaaacaacaagcataaaggcgaaggtcggcttttgttctttgacgattaatgctaaaaaagtagcgattaaaccaagtccaacaatttgtatgatttcgatttgtaagccctcccctatccttgaaatagaaatacggctttaatctttttaaacaaatcatctacaatggttgccaccataaacaaaatgtagataaacccaagcagcgtgacccactgagcgtactcctttttccccatttgatctaaaatcgtatggaggaatgccacaacgatgcctactcccgcaatttgaaaaatgacgtttacatcaacgcccatgctctcgactcccttcctctcacatcaataaaagaatcagtagtaatccgcttaaaaatccgaggcttctgaccattttttcattttttgcttgggcgatttcagcttccttctcctccgattccaaatgacctaaagcaagcttgatatacttttgctgagaagtgacatcatgctgaccaagtgtttctccaaagtgcttcagtgcctcatattcgccttttttcaaaacggtttttttccaaacatcctcaagactctcattccatgcatgccgtgccgaaaaagttccgactttgagtttttctgcaaattgttcaaataaccgattcacaggaggacctacttgcgacgcaatttgctctgcagcccgcgctagaggcgtttgcccatacataatttcagcttcaagagactggagcgcaaaccgaagctgccgaatttgtttcggccgatcgctatatcgtttggcaaactcgaaccctccccaagtcgtagccgcgacaatcaagatagcgccaatgagctttaacatacgtccactccccgcctccatttcatctcttgtccgtcttggtcatatatccgcctaatcgtgctgggaccattcttgcgatttaattcaacatatcgttcaaatactcgaagctcccataacggcttcaatgatggacgtttatacacatcttcaagtgaatagccatgaactgagacgataatggtgactccggcatgaatcgcttctaaaagtgcctgtacatcctcgctttttccgatttcatcgacaatcatgacctctggactcatagaccgaatcatcatcatcaaaccttcagcctttggacacgcatcgagcacatcaacccggtgtccaaactggtgctgcggcacccctcttatacacccagcgatttcggaacgctcatctataatgcctgtttttttaggaggaattgcttttgtgccagtactagccagtcttgctacatcccgcaataatgtcgttttccctgtttgcggtggaccgatgatgagtgtattgcaccagtgctcgtcatataaataaggaagaaagggaagcgcaatcccgattttttcttttgcgatgcggatattaaatgaagagatatctcttaatcctttgacaatgccgttttcaacgatcacctttcctgcaattcccacccggtgtccgccagatatggtgatgtagccttgctttagctcctcttcaagtgtgtacatgctgtaattgctcagcctgcctaatagctgagacgcatcttctcctgttgtgcgataagaaagaaagcgcggttttcctctttgcatcaattcaataggacgatccgtgcgaatgcggatttcttctatttgatcccattctgcttcttttagcagtctaagttcttgtccaatcgagtgcgggagaatatccaacaaactccgcaacgaattcccctcctttttttcttctctaaaatgtatgatgggagccgttaattatgccaagccgtttcacttatagatcccaacaagaataaacacgacaccaatgaaaataaagacgagcttggcataggataactgccctgcaatttgatagattccaatcgtcatcgtgataataaaaatgagcggcccaatgatcgccaatatactattgatgacaaccgcttttcgaacgtcatttgtgactaaaatgaggatggcggccgtcagttcaatcgctgccgataagaacctcatgccggccattgcagctactgacggatggatgcctgggaaaagaaatggtttcatatagaacctccagctttttttacactatatgcttgtctagatggaagtagtcttgtttttcagaaaggaaaagagatgaatgagagaattgagagaaggtctgccttttgaggagtcttacatgttttacaataaaaaaagactgtaaacacgacgtttacagtcaaagcgtgtagacaaaccctcgcattcggtgtcagtcctgcgcgccgatgctcacgaatggcaaattcgctccgcttcggtgctcgtccttcctagacttcaaaggttttctatcacgctgaaaagaagacaaagggctaaaataaacgtcattttagccctttgtcaacaatctaaaaagactgtaaacacgaggtttacagtctttcttcgttcattacgctcttgacacgtatgaaccgtctgatgtattaatgactagtttatctccttggttcacaaagaaaggaacgttgacgattaaaccagtttcagtttttgcaggttttgagccgcctgatgttgtgtcacctttaataccaggctctgtttctactacttctagttctaccgtgtttggaagttctactccaagtgtttcagcaccgtacatcacaatttgaactgacatattttctagcaaatatttcagctcatctttaatttgtgtttcacttagttcaagctgctcataagaacttgtatccatgaagacatgctggtcgccatttgcgtacaagtactgcattgtttttgtttcaatttgagctttcgctactttttcgcctgcacggaatgttttttcttgaatggcaccagtacgcaggttacgcagtttcgaacgaacaaacgctgcgcctttccctggctttacgtgttggaaatccactacacgccaaataccgccgtccacttcaattgtcaggcctgtacgaaaatcgtttactgaaatcattttgtcatcctcctacatttcaccatcataatatgataagttctttcggtgagtgggtcaatcgtttattgccgtcagctgtcaggacaatatcatcctcaattctcacgccgccgacatccggcaagtaaattcccggctcaactgtcacgaccattccttcttctaagacgacctctgatcgtgaggaaaggcctggcgcttcatgtacttccatccctagcccgtggccagttgaatgcccgaagtattgaccatagccatacttttcaatgatgtcacgtgtgatgcgatcagcttcttttcctgttaagcctggcttgattctatccacaccagcgttttctgcttctaatacgatatgataaatttcctttagcttatcgctcggtgtgccgacagcaatcgttcttgtcatatcagaacaataacctttatagtaagcaccaaaatcgagtgtgactaaatcaccagattcaatcaccttttcactcgctcttccgtgcggcaagcttgaacgaacacctgaggcgacaatcatatcgaatgaagatccttcagcgccttcttttctcatgaaaaattcaagctcgttcatgacagcaatttccgtcaagcccggcttgatgtaagtgagaatatgatcaaaggcgtgatctgcaatcttcgcagcttcctctaatatcttaatctcttcactagacttaatcaagcgcaacttttcaactgattctgagaccggaacaagctctatatcgcctgctttatctgcatactgctggtacgtggcaaatgtcatatgatgttgttcaaacccaaggcgttttatcccaaattcctttgccgtttgggctgcggtttccacgatgtttcctttatgttcaataatgtcgtagccttttacttggtccttcgcttgctctgtataacgaaaatccgtgataaaagctgcctggtcctttgaaacaactgcaagaccggctgagccagtaaagctggtcatgtactgtaaattaaagctgctcgtaatgacaagaccatcgatctctaattcagataaaagtgttcttaacttttcaagtttcatgatactgctcccccttcactcactaaataacgaatcgccaatttatacccttctaaaccaagaccaacgatttgcccttggcatactggagcaagtacagaatgatggcggaattcctctctcttatgaacgtttgagatatgtacttcgacgacggataaagaaatacttgcaatggcatctctcagcgcatagctgtagtgtgtaaaagcacccgggttaaacacgactccatcgtactgatcttctgcctcgtggagcgcatcaatcaaatccccttcgtgattcgattgaaagaacgttaactggatattggctctttctgcaaactggaacaaatccgtttctaaatctgtcagcgtcttacttccgtaaacagccggctctcttttgccaagcctatttaaattgggcccattcagcacaagaaaatgaggcatacaaccactccttcaccctaattcaatctatatcgagatctgtttctttttcattagaaacctttcgtttccaaaaatattttatcatatgaataggtgatttacactttattctgtctttttcccgagtgcccttgcaagcttctgactcgttaattcattatattcaaacgaaatactgtacccgacaaacatgccatataaaatatataggcaaaatgtcgtgacgatggtgctttgctgcaaatcttggacttgctttacatctgggaaaatcggattaaatacgtaaaaaacgagcagccataaaagcgcgccatatatcagccccatccaatagcctttgattcgttttaaaaccccataataaataaaggctgctccaatcgataaaacccctaaaagcacaatactaataaaagtgccaagtcctccctttttccactctccgagcacaaaaggctgaaggagcatattgggactcacctctgagaaatgaaacatatgggtcagaaacccgataaagccccaaaaaacaccgccaacaaagcctgtcgcagctgctcttgcccacagcgatgacgtttgtacagcctgatttgtctcttcttggtttttcttttcatcacgtttcatttgtgaacacctccagcaagtagtatgtccaaaatgtcataaaaaaaaggatttccatacgtgagtgtaaaatttttataacagggtatactggctaaaaagaggtagatagaattctagtagataatcgacttgtgcgctagtgatttcccctcatttcctgtacaataaaggtataaggaaatgcatgtaaattacaggaaacaggcaggttgatgaaatatgtccaatcaaacaaaacgtccagcatatggagggcaggcagttgtcgaaggtgtcatgtttggaggtaaaaagaactatgtgacagcgattcggcgaaaggatcagtccattgagtttttgaagcttccccggacctccaataaacgaaccgcctttctcaagaaaatcccctttgtcaggggtgttgctgcacttgttgaagcaagcgcaaatggcagtaagcacttgaacttctccagcgagcgctatgacttagatccttcagaagatcatactcttgaaaaagaacaaaaaagctcgaaattatccatgattttcggcattgctgtaatcggagttctctctcttctctttagtaaatttgtctttaccctagtacctgtctttttagctgaactggtgcggcccgtcttttcagggaatttcgcacaaatcgcagtggaaacattctttaaactggtcctgttattaggctacatttactttatttccatgacccctttaattaaaagggtatttcaatatcatggcgcagaacataaagtcataaactgctatgaacagaatcttgacatcacagtggaaaatgtacaaaaacaatcacggctgcattatcgatgcggtagcagctttattttattcactgtcattgtcggaatgttcgtctatttactcgtaccgacagatcctttatgggtgagagttctgaatcgcttggcgctcattccggttgttctgggcatttcatttgaagtgcttcagctcacgaacaaactccgagaagtgcctgtgcttaaagtgcttggctatcctggcctttggctgcaattgctcacaacaaaagaaccctctgacgatcaagtcgaggtagccattgcaagttttaatgaacttcttcgtttagaggaagcgtctgagaaacaagcatcagattctgctcatcaagtgatctaacttataaatccggtaaattccttcggaggtggacagttatgaatcgccgagtacatcctgcttttaccattattttcgctttaggtgttttgggatttgtgtatttactcacaacgaatccaggcagactttttacaatgctgctatcagttgtgatcattggagcggttctatttttcctatttagatggctgatgaatcgaagaactggaacagagggcaatctttatcgtaaagcagtcaaacaatcaaaacgtcgctaccagcagcctaaaccaaaaacgaaaagccagatgaaaaatcgggtcactcatttgcgaagcgtgccgactgaccacaagtctaagcccgtccttctcaaaaagaaaagccaaacacagttaactgtgattgaaggcaagaaaaacaaaaagaaaaatcgcgccttgttttaaaatgtccagctttttaaaaattgctcggctttctgtctgcctagatcgacaagcgcctttttcttttctgtcttcagatgaaaatcagtggcaatgacgtgttctacaggaataaaaataacatgacgttcgtgttttgtggcaatgtgtctttcgtcatgagcaccacgcatcgtttcaaaaagagcgccaaacagttcaaacgcattgcggatggagtgttgagggcgttctttttcgtttggggttaatgtgacaccgacgaacggtctttttttctcttccgcaaacaaccaaattggaaaattgctaagcactcctccatccacaatggtacaaatgccttttgatgaccttagtttgacaggctcgaaaaaatacggcaggctgcaactcatccgaatcgcccttgcaacggaaaagcgctctggatttaagccgtatgaaggaaggtcgtctggcagcacgaggattttcccatttgttaaatcggaggcaacaattttcagcgaatcttttttgagatctccaaatacggtaaccccttttcgttttaaaacgtctgtcagccatttttccagccggtcgcctttgtacagaccgaggcgccagtaaatggatacccacctgagcatttgaaacggaatgaattggcatctcctgtcaagtaagtgatgttcctccatttcatctaaaagctcccgaatctcctgactagtaaaacctgctgcgatgaatgaagcaatgatcgctccagcacttgtaccagcaaggcggacaaattgatatcctctcgcttcaagcgcttcataggcacccgcaagtgctgcccctttaatgcctccacctgagaacacaccatctatcttcatcaaggagccccctttgatatcacgctattaatagtgtaagagcatatgctttcaattagaactttaatcaaaaaggacacccatgctgagggtgtcctttcagcgcgcggacaaaccctcgcattcggtgtcaggtctgcgctccggtgctcacgaatgtcaaattcgctccgctccggtactcgtccttcctagactgcaaaggttttcaagtcacgctgaaaaaacagaagacaaagggctaaaataaagttcattttagccctttgtcaacaatatgaaagaacacccttgctaagggtgtcctttttcttaagattcttgatttgtttgttcgtttttcttttgaatcgctttcagctgaacagatcgctcgtcgttttcttcaaagaattgaacaagatcgccgatgcggtcaatgctgttccagctgagatgatgttcaatgccttctacatcatcataaattttctcttcatctacaccaatgattcttaaaaattgctctagcagttcatgtctgtatacgagacgttttccaatttttttgcctttcggggttaaaattagaccacgatacttctcataaatgaggtattcatctttatctagcttctgaaccatttttgttacagaggagggatggacagcgagtgcttctgcaatatcagagactctggcatatcctttttcttctatcagcatatatatttgttcaatgtaatcttccatactaggtgtagtcataaaacccctccataatgcacctttacttaataatcataacaattctacaccatcgcccattaaaaaacaaggagtgtccactgtcttaacgcttgtaattccactcgtctgtggcatatttcgttttggcgagatgatggacaaacgctaattcttcatctgtcagctcataaggcacaagctcaatatttaaccctttttcaaatcctcgtttaaacgcaacacgcgcatcgtctattgtacaagttcggtctgagatttcattgatggcgaccgctttgtttttaaagctccgctgcatccgctctctcacacggtcgtttggataaagaaataaatcgaacaatttgtcctcatcaaggtcaattaagatggagccgtgctggaggatcactcctttttgtctcgtttgagcactgcctgctacctttctgccttctacgacaagctcataccaggaaggagcatcgaagcatacagacgatcttggattttttaagctttctttttctttatctgtacgaggaatggcaaaatatgcatcgagtcccagttctttaaagccctctaaaatgccttctgaaatgacgcggtatgcctctgtcaccgtcgctggcatttctggatgttcctctgacacaatcacgctgtaggtcagctcctgatcatgaagaaccccccgccctccagttggtctacggacaaacccaagaccatagcgctcgactgcttccatgttgatttccttttcaacatgctgaaaatacccaacagacaatgtcgccggattccatccataaaaacggatgacaggcgggatgagcttctcactatgccaataaagcaaggcttcatccattgccatgttaaaggcagggtcttgatttcctgtatcaatgaaacaccatttctctttttgcatataaaaatcccttctcttttacgtagtcaatgttagatgatggtgatggccaccggttttctctcttcatcagtctatcaaatagggaacgaattgaaaataattcttaccatttatgatgacaagtttcttttgctttactataatagtatttgtctaaaacgtaccatcagacaggctactgtgctgatgctcaagaaggagtcgagttgtattgtcaatattcaactatatcgtcctctcactttgtggacttttcgttctttattccatcggcagctacatttatcagcagcgcattatgaaaacgctgacggaagcagaatttattaaaggttaccgcaaagctcaactcattgatgtgagagagccaaatgagtttgaaggcggacatattttaggggcaagaaacatccccctttcccagctaaagcagcgcaaaaatgaaattcgtcctgacaagcctgtttatctctattgccaaaacaatttaagaagcggaaaagcagctcaaactttacgtaaaaacggctgtcgtgagatttataatttaaaaggcggctttaaaaaatggggcggccgcatcaaaacgaagaactaacaaaaaagactctgggagcgtgatccccctgagtctttttttctttatctttcaaaaacgaggactggattccgcgcggcctttgtttcgtccattcgtttgacgaccgtcgtatgcggcgcttcctgtaccacttctggattctcttctgcttctttggcaatctgaatcatcgcttcgatgaaggcatcaagagtttcttttgattctgtttcagttggttcaatcatgatacattcctctacattgagcgggaagtagatcgttggcggatgatagccaaaatcaagtaatcgtttagcaatatcgagtgtccgcacacctaattttttctgacgtttacctgaaagaacaaattcatgcttacagtgacggtcaaatggcaaatcgaaatgagcacttaagcggcgcatcatatagttcgcatttaacacggcattatccgttacagcctttaggccgtctggacccatagagcgaatgtacgcatatgctctgacgttaatgccaaagttgccatagaacggcttcacgcggccaattgattctggtcgatcatcatcaaagtaaaagcggccttccttcttcacaagcaccggctttggcaagtacggaatcaaatccttttttacaccaacaggacctgaaccagggcctccgcctccgtgtggacctgtaaaggttttatgaagatttaagtgaacgacgtcaaaccccatatcccccggtcttgctctgcttaaaacggcattcaagttggctccgtcataataaagcttaccgccagctccatgaacgatttcagccatttctaaaatattttcttcgaataggccgagtgtattcggattcgtcagcattaaagcagctgtttcttcattgacaacacggcgcaggtcctctaaatcaacaagcccattcgcatcagatgcgacggtaatggtttcaaatccggccactgtcgcagatgccgggttcgttccatgggcagaatcaggcacaatgacttttgttcgcttatggtctcctcttgcttcatggtacgcacggatcatcatgagtcctgtccattccccgtgtgctcctgccgcaggctgtaatgtcacagcgtccatcccagtaatttcttcaagatgagcacccaggtcgtggagtaactctaatgcaccttgcacagtgtctgcctcctgtagtggatggacttgcgcgaagcctgcaaggcgtgcgaccttttcattaatcttcggattatatttcatcgtacaagagccaagaggataaaatcctgaatcgaccccatgattacgtcttgataatgctgtataatgacgcatgatatcaagctcagatacttcaggaagctcagcatcctcatgacggatatacgtgtcatcaaataaagacgggatctcctgttcaggtacatctaaatcaggcaggctataaccaattcttccttctttggataattcaaaaataagcggctgatcttgtttattcatggcgatcccccaattccttaatgaacgtatcaatttcttctttcgttcttagctctgttacggcgacaagcatgtgatgttgaagctctgggtagtctatccctaagtcatagccgccgatgattcctttttcaagcaatcgtttattggcttctttcacaggctcttgtaatttgatcacaaattcattaaaatgggccccttctacatcagcaagcagtccatatgtttgagcctgcgtcttagcatagtgcgctttttgcacgttttgataggcgatgtctttgatgcctgtttttccgagtgctgtcatggcaacggaagcggctaatgcatttaatgcctgattcgaacaaatattggacgtcgctttatctctccgaatatgctgctcacgcgcttgaagggtcagcacaaacccacgaacaccattttcgtcttctgtctgcccgactaaacgacctggcacttttcgcatcaactttttcgtcacagcaaaatatccgcaatgcggcccgccaaacgctgctggaatgccaaacggctgtgcatcaccaacgacaatgtctgccccaagtttacctggcggcgtcagtaacccgagtgcaagcggattacttgagacaatgaacagactttttcctttatgcgcaataggttcaatgtcttttaacggttcgacgacaccaaagaagtttggatattgcataagaactgctgctgtatcgtcacagacggccttctctaatgctgctagatccgtctgccctttttttgcaggcacttcaacaacttcgatgtgctgtcctttggcgtatgtttttagcactgctcttgattcagggtgaaccgtttcagaaacaaccacttttttcttttttgtgtgtcccgcagccagcatcgccgcttcagctaatgccgtcccgccatcatacatcgaggagttggcaagatccatacccgtcagctcagcaatcattgtttgaaattcaaaaatggcttgtagttcaccttgcgaaatctccggctgataaggtgtgtatgctgtataaaattcggaacgtgagatgacatgatcaacaatgacaggctggtaatgatcatatacaccggcaccaagaaacgatgcataggaaaccgtatccttattctttgcagctaatcgggataattcccttacaagctctgtttcagatgcggcttctttaatgttgtatgctcctttaaatctcactttttctgggatatctgaaaaaagctcatcaatcgactgaacgccgatgacatccagcatttctttttgatctcgctcggtttgcggcagatacctgtgcttcatcctctattccccctcgttatttggctcttttataaaatggtgttgcgacgattttagcttttagacgttttttgcgaacttgtacttccacctctgcctgaagctgcgcctgagaagattcgatcaaagcaagcccgacatttttctttaatgttggggattgtgtgccggttgtgacaaccccaatctgcttttctcctgaaaagaccggatagtctgtgcgcggaatccctttatcgatcatttcaatgccgacaagctttcgcttcgctccctcttctttttgctgtttgagcgcttctttgccaataaaattggcttctttatccgttttgacagcaaagccaatcccgccttctaatggagagatatcctttgtcagctcctggccataaagcggaagtcttgcttcaaatcttaaggtgtcacgtgcaccgagcccgcacggtattaacccttttggctcgcctgcttctaataaagccgaccagatgtggaccgcatcttctgactggcagtagatttcaaagccgtcctcccctgtgtagcccgttcttgaaacaagcacttctttttgagcgacctcagcttttgataaaaatgtaaatggcttgagagatgtcacctcttcatccgccacatctttcataatgtcagcagcaagaggtccttgaagggctagcaaggcgatttgatccgagacattttggatcaatacgtcgttctcatcttgatgctgaagcagccaatccacatctttttcaatatttgatgcattaatgacaagcagataattgttcttttctttttgatagacgagcagatcatccaccgtcccgccatcttcatagcacatggctgtatatagtgccttaccgtctgtcagcttagacacatcattggttaataacctttgtaaaaaaggaagggcatcttgacctttgatttccacctcacccatgtgagacacatcaaaaagccctgcttttgttcgaacagcttcatgttcttctttaatggaagaaaattggacaggtaattcccagcccccgaagtcaatggtttttgcgccaaacgtttcatacgcatgaaaaagcggtgttcgtttcaacatcaatcgtttcccccttttttctttcagtgcagatcacaagctgaattttcagaaaaaaatcgcagcaaaaaaggacagagcgttcccttttatcaaaaagaagtctctgtccttgcacctgaaagtttacagcacaacagcattgtgcgttttcccctttggtggtttgctaaaaatcgatgagcaaacactctccagagttgcgtccggtaagagtacttttgcctgagagattcactgaaacgattcagcttgctccttcggcgcctgccagtgctaaataaccgccaagtctctccccataccatcatccgctcatattcttcacatttattggacatactatcaaaatgggtgacttattttctagatcacttaccaacatcctaccattagaaacggatgaagagcaacagaaaaatcattaacatttttcaaacaaacattcactatcgttcgcttttattcatatatctagtcttttaaagacctcttaaaaaatgaagcgtttaaatacagaacaattttatcattaacctattagaaaggcaggcgatcacattgaatatacaaacgatttttgatcaggaatgggcaagtgaatttcagcagcggcttgcagcagacggcccctgggcgaactgggaaatgtaccgtttagcgacgcaggttcaaaaagtcacagccattgattcatttgaaggactgcaagctcccgcgcacctgcctgcattcacgcctttaaaacatcagcttgaagtagccagaagagtcgtagaagagatgaacggaaaagccattttagcagatgaagtgggacttggaaaaaccgtagaagcaggactcattatcaaagaatacatgattcgtggacttgcaaaaaaaattctcatacttgtccccgcctcccttgtgtctcaatgggtacaggagctgcggacgaaattttacattgatgctgttgaacaaaaaaagagctacgtgtgggagcagtgtgacgtcgtggtttcctccattgatacagccaaaagacagccgcatcgagacaccattttatcaattgcctacgatatggtcattattgatgaagcacacaaactgaaaaacaataaaacgaaaaactatgaatttgtgagaaatctaaataagaaattctgcctgctgctgacagcgacacctatccaaaaccgtatcggagaaatatttaatctcgtttcccttctgaagccaggccacctcgggaatgaacatcagtttaaagatgtctttgccaaaaaggatttacagcttgaagaccacgaccgattaaaacagcttgtgaataaagtgatgattcgtaaccgaaggcaagacacgggcatcgagtggacaaaacggcatgtcaaaacgatttccattgatttctctccaacggaacaagctttatatgatgaaatctgcaagctgaaagagaacccgtcttatacaaagcacatgttttccatcatgaccttggaacgtgaatgctgttcaagccgcgaggcggtctatatgacgattaaaaaaatgcaggaagatgaaaaacatatccttggatcttctgctatagcgcaaattatggagaaaatcaatcaagttcagcaaaacacaaaggcgcttgaagtcgtcaagcttattcagcagttaaatgaaaaggtcattattttcaccgaataccgcgcgacacaaatatatttacaatggtttcttcagcaaaatggcatcagctccgttccttttcgaggcggctttaagcggggcaaaaaagattggatgaaagatttatttagagaacgggcgcaagtgttaattgcgacagaagcgggcggcgaaggaatcaaccttcagttttgtaaccaaatcatcaactacgatcttccgtggaacccgatgcgtctagaacagcgaattggacgtatccaccgccttggacaagagcgagatgtccacatttacaatatggcaacaaacggaaccgttgaggaacatatcttaaagcttttatatgaaaaaattcagctgtttgaaaacgtcattggcgatctagatgatattttaacgcgaatagatatcaaagatgccgaaacagaactacatcagattctctttcagcacgaatcagacggagacatgaaaaagaaattaacccagtttgcttcctatttatcagaagcaaaaacaccacttttagaaaaaagacagcaaggctcataaaggagagttgatcaatggagcagcgtgacatacatacctttcttctccgtttctttcaggcaaatcaatgcgacatactagaagaaagtgcaggacatatgaccgtacaactaaccatcgatatggataaattgattatgaaccgccctttttattggcactggcttgaaaaaactggtggtgtaccagagccgcggcaattgaccctcatcaccgatcaaaaaaaagtggatgatacgattgagggtgaatttatccactttggctcccctcgtttatttcaaatatttgaagctgtcaaacagcagggccgttttatccgtctctatgaacgagtcactccgctcacgaacaaccagatcgcactcgagccatggcttggtctcaatgtgaaaatttcttatctcgcagatcgaaagaaggataaacttttatcactaggacttcatctaatacgcggagaagtcgttgaacaatttcaagaaaagctggaaacccgtgagctgtcatctcaaattcccgattattgctttacaatgagtacaatgatcaagccagaaagcggagtcaaacggctctatagtctaatggagcgttacgcccatgaggaaccagacaattgggcggtgagagctgttcaaaaatggaaagaagacactgaacttttaaaccaattttatgaagggacttcagacacgtctgtagaatatgaaatagaaagacaagcacttaaaactttatacgaaccaaaaatcagtcttacgattgaaaatggcggacttttttacttacagcaaaaaagaggaggttgacccataggtcccctccctttcatgtgacatacaattttcgatcagccaaaagcaacgtttgtctgtttgtattgggcggaaaaatgacgcaagcaaactatgaggtcttaccacctgtgtctttccatttcatgcgttaagtgcctgaaatacatgattcagtattttaggagggtatttgtatggaaaagaaaacgaacatattagacagtgaatggattgaattattacttgaagctcgtaaagcagggctaacagttgaagaagtccgtcaattcctcaaatcaagtgaaaagtcctctgagtctcaccctctggtaagaagtcattctatcaaacctttctgaatgtgctataatatcgaaaggaaggtgatgacattgattggccagcgtattaaacaataccgcaatgaaaaaggctactcactatcagaactggccgaaaaggctggggtagcgaagtcttatttaagctcaatagaaagaaacttgcaaacaaacccctccattcaatttcttgaaaaagtctccgctgttctggacgtctcggttcatacactgttacacgaaaaagatgaaaccgaatacgatggtcaattagatagtgaatgggaaaaactagttcgagatgcaatgacatcaggggtttcgaaaaagcaatttcgtgaatttttagattatcaaatctggaaaaaaaatcaagaagaggagtaaagcgcacattttagcgcatactcctccaattgctatgcagagcttgatatcagtctaaagactggctttattttttatcttcgctgtgtgctttttcgttttctttcacgtagcctttttcatccgtatgctttttgggattgatcgttaaaccattccactgagtcgcttcgaaggaaagatcaatttgaatcgcatcgccttggtatttattttggatatagtgaccagctttatccttcgtctggtcattgacaaattcaatgatcatttccattttatcgtaatcaaacgggttctttggaatgccgtcatactctggagccactgttccatcaacagttgctacattaatcttcccactttcatgtaaaaacttctcatcgacggcatgacgaagcttttcaaatgcggtctgatcctgttttgacgttagttgatgcaagtcaagcaggtttgcatggtctaagataatatttttcggataaccatttccaccttcggctccaaccgtaagaacactcacctgaaactggctgagaaattcttcagctgtattcttaccgccattcttcgcggaagctccgtcttgaaactggctgtaatcaagactcatcagcacttgattgatcgcaagcgatcctttattttcaaaatgaaattctttcttgatccgatcaccaggttttaagttcgcaaggttgatggcgccggagttctcttttgctgataaatccagctctcctgtcgagtagaccgcgtttgccttttctacatcgttaaacgccgcccatgtccccccgccgattaatgcaaggcctaaagcccctgataatacacctaaacgaattgatcttttctttgccatgaatgaaccccctaataaattgttttattgaaacctaattaggttacaaacgaaaatttaagcttgttcctctgacatatgtaaatcagccgtgtgtcttcggtgttttgcagcgcccacaaaatgaagagtggaataaacgagcagcatcacacctggtataatgagcagcaacgcagttccagccgaagtccctgcatacgatagaagctttcctgcataaggaatgttcacacccgtatactgcgcagccacctgatccgcttttactagcgtgccgtcctgatacatattgtggtcacctttcgtctcaaaggctttatttgctccctttcctttcaccccaacaattcggtgggtcacataagactggtcctgcttcgtttgaaacgtgataatatctccttttttaagcgcctccggtgaagtcacttcttttacgacaatgagtgagccagtcgaaaattctggttccattgatccagataatacttgcttgaattgataaccgaaaatctgaggatctcccccagtagttcttgaagacaatacgacaataatacatgcaatcatcaccgtgaacaccaccacataaagaatacttccagacatcttcatccattttttcatgacctcttctccccttcgcctatcattgtttcctttagaagacagttccatttaggatgccttttcttgacactttgcgagctgcatatgtttagaccatatgaatgcttcttcagatccaccaaaacctttaggataatagattttaaacgcatagattccattcgtttttgctttatctgtcgtgacagtcgttgtttcttgtgaaagaagggactgtatagagcctttttcaagaatatgaccatcttgtaacggcttctgctcactttttactttatgtaattcccatttccattcagagtgtgcaataggttgtccactattttttaatgtcatgctcaagctttgaggcgcgcagactgttcctttgttcatcgtttgatcgatgagttccaaatgacttctatcccatttggtaggctgacaatgctgatccgtctgttcaaaattttcgcatgttttcatgacaaagtttgagtgctcaacatcgttaaaagaagcgttcgttgttgagatcaaaagagatgtgaaaatcaaacaaatggtacaaaagagtacaaagagcgactgtttcattcattctccaactccttgaacgattgttctttaataagaacgattacatacagtataaggaaatacctataaaacccaaaacgtcaaattagtccattttgttcttaaacaagaactattacgagaaaattcttccattttctcattctttcgccgtattcaataattttttgtgtgacatttgtacttcttaaaaatttacataaaagtgcagcatttggtcagaataataacaggtgaggtgatgtgaagtgaaatatggaaagatgataatcatgctcagtttattgttgggccctatgatatacgacgccaatcctgctgatgcgaaaggtttcactgccgccgcagatcaatgggaaacacgggcagtcaaagaagcaaagaaacgatatccgctggcacaagtcttattcaaacaaaaagtatgggaccgtcatcgtgagaaggaatctgtgaaacagtatcatattacgttaaaagaccacgccaaagaatttggggtatttgtcactatttcttataacccttactcaaacaaggtcaataaagtgatagttgtggaagaatacagctaaaggggcataaaaaaaccgcctgctggcggctttttactttcgtcgatgtcgctgacgtttttttaacatcattgaaaacccaaacggcagaaccccaaataaacgctgtgaaaatggcggtttcgtttccattttctcttgtttatgttccttccgttcgtcacgtggtgtattcatatatttaatgatttcctgcgtcatatattttacatagtcattggttttcaacacattcacctcttctttcttcaagtgttacctagaagaggatcattttatacactggctattcagggtttgcccatttcatgatttcacgggtcttccaatccagcaccagttcccgctcatctgataaaccatcctttgttttcacactgactaacatgaggatacgctttttcttttgatcgcatgtcatctgcttcaatgtcacgcggccttcttcagtgtcaatatgggtatgctgcttttcacacaaacgatgtaatgtacgggcagcttcactcgcccccactctgaaaagctgctgttttttataaaaagaaatcgtcagctctgcacttctcagctctttttgaaaccctatcgtcattgatcctaggatcaagagaaaaaatagaatcgcagccagtacatgcggatagataaatcctccttctcttttcacgatgtaggaaccacccctttatatatgaaaaaaacggcttcatacaccttaccagattcatctgtgactttcaggatggctctatattgattcgttctgacacgaaattctttcaccttttgcaataaaggaagatggcctgcttgatccattcgcttccgaagcatctcttgatatggctcaatcgttaccactcgcccttgatcagatacatactctaacgctttacctccttgcaccgatctaacagccgttgcacggcttaattccttatctaattgcaggacagtctgtttccactccatttgtgaaaatcggttaatctcttcaaaaggacgggctttctcagctgtagaaaagattagtacacagccaaaagaaaggaacaaaaatagctgtaattgccacaaagcctggacaagggtaaaaccttgttcaccgttcagcaacatggtgaaagcatatggtctgctttttttgtattttgtatgatacacaccccttctctttactccaattgaatacatatgtgacgtcgcctcgtttctttttgacagaaggttttgtaccatctatgaacgattcattcatctgttcatgcaagatttggtaagcttcaagtttggctcttacttcatttttccctatcatgattttttcataggctggcatgagcacaagggctgcaaataggaagatatgacaagcaaacagcgcctcaatcgtactaaaccctctattgtttttgaacatggattcgcccgcttcctaaatagatcgtgagtttatacgtttgactgccaaattgaatgatgagagacccgccgctgcttggatgtccgtttacattaaaatagataccttgtggaaatgtagaagccttaatgcttcccttttgttgctgaaaagaagtaatgacttcgccatccttctgatcgattacctgatacgatacatgtggcggatggaattcaacatacacacgtgtttttttgataaatgcagtataagcagccaattgaaaatcttgtttcatgatgttcacttgtcttttggcttcagcgccttctattaaatttgggatttttcctcctatgatcgacaatagaatcgatagaacaagtaagatcattagctgttcaatgagggtaaaacccttctcatgaaaaatcaatttattcatgcttcacatggccgttttgaatgacaatcgcttttccattaggacacgttaatccctttttgacatagccttctttttctaattcagctaaagatggtgtcttgccatcatgctctaattcatatgccatcacctgtgtgctcaccattgatttaagcccttcacagccctttgcttgaatcgtttggtggtgacgagtgatattcgggatggtaataagtaaaagaatcgaaatcacgagcatgacaattaacatttctaacagggtaaatcctttatcattcatgtctttgtcctccttcttacacttgctccatgagttgatacattggtaaaagaatagatagatacacaatgagtataagaagtgctgtcacaccatagatcaccggctgcagccacgaaatccatttttcaattttcagctctgcattctctaatagaaattggctgtacgtgtacatttctcttgcaagcatcccgctcgcttcaccatgctcgatgacggctgcaaaatgtttctcgaaaaaaggagacgagcttacttgatgtgccatgctttctccttttcttagctcttcaatcatctgttctgatatttcttgaagaaagggtaagtagctttgctgtttaaaagctagcaagctctcgtacatcgataatccagcttgaagcagtccgcttaactgaagagagaaaaggtacgtatgcatcagccgcattcctttatataaaaaaggaaacctgcttatcaccctcagcttctcaagggtggactttttcttaaaaaagacagcatagtatccggtcaaacagatacacacacagccgatgaggaggagagaaacatgcagcaattgaaaaagtccaaacataccttgaatcagccatgacattcgggtatccatcgaggagtacaagagagaaaattgaggaatgatcatttgttgaacgagtatgagcacgaccaaaaccgtaaagatgaggaagatcgggtaacgtaacatgcgtttaaacgtgtctacctgtttgatttttttctctaaaaaccgcgcgctttgttcaagtgcttgtgctagactgccatgcttttcggagaaacttaatatggcaatgacttcccgctgaaattggagtctctccagcaccacataaaaaggctccccttcaagtagccactgaatgcccggtgttaattgttgctgctgctcattcgacaactggatattcaccatcgttaatgcctcaatcactgtatatccagcctgaatcaattgagcaagttttgatagacattccgcttggtcctttttagaccatgctttagaggcttgcttcttcataaacccagcgatgataggtgtttttcgataaatagcctagtgccactcctttccgaattaatctttgcagtgtttcatatgacgagtgagcatattctcctttagcctccttgatacactcacctagctcctttccgaacagcagttcaaatacatttgttcgtctgaccgatcgatttaatttacagtaaagctgacatgtttctccgcaaaaaggacaggtgagctcgattaatcgctgcgcagcaatcgcaaccatcgtttgttcgagttcattcatcgtgacaccaaattcaagcatacgataaagggctccttttgcatttttcgcatgaagcgtactcatcactaaatggcctgtcagtgctgctctaattgccgttcgggccgtttcggcatctcttatttctcctagcacaatcagatctggatcatgtcttaaaatagcacgtaatcctgcggcatatgtgatgccggctttttcattcacttgaacctgtaacacttcttcatttcttgtttccacaggatcttcaagtgtaataatatttcggttgaaattcttttttgcaaactggattaatgaataaagggttgttgttttccctgaatttgttggaccggtaaataaaatcagcccatgcgaatgattcaaaaatgataataatctgatggaggctttcggaaatagtgacagatgttttatttttggaacatgatcctgcggcaatattctaatcactaaactctcatcatttacagttggtaaggtagacatccgaataaacacctggccgcttcttagcatcacagctagtgacccattttgcggcctccttttttccccgatatccatggatgataaaaatttaaaatgagcaatgagccgctcgccgctttttttatcaatggttcgctgctgaattaaatctgagtctacgcggaaagataccgacgcttccttttcttttggaacaatatgcacatcagatgctctcatgcggcatgcttcttctagcagctcttgtcccaaatattcaataccatacaaatggttcactcccttctctgaccatattgtaagttggaggaacctgtctgacaaaagagcattttatcattttaacgactaagcatgcgaaaaaatcatcagcttgcgatggaaaacgtggttttttaaaaaagagcatataaaaaaacctgacttttacaagtgcaggttttttggtcatgtggcttcttgcggctgttcttcaaaaatacgaaatcctcttttttctaaagcttttgcaaggctgtgttcagtatttacttttgagaaatcaatgcccaatttcacgacggtttgagcaatttctgggcggatgcctgaaataatcgtctcgattcctagaagcttcgcactatccaccactttaaagagctgataagcaaccatcgtatcaacgaccggtacgcctgatatatcaataaacaaatgcgttagacgcagtcttgaagcctgttctagtacggattctagaataattttggcccggtacgtatcaatctctccgatgagcggcaaaatcccaatttcctttgaaactggaataacaggagcactcagttcctgaatcatctctctttgtgcatttagctgactcagtgtcacacggtcgtattcttctgataaacgctcgatcatattatcaaacgtggaatgaaaatgctgattccacccgcacacatcttggagcgtcacttcaagctcggtttctagtatgaatttctcgattctcgaacagaaaatctgacggaatatcttaaattgtccaatgatttcatataaaggcacctcgtgaacggctcgatcacgtgcaatatcaacagaccatttttttaaatgattttctactttgtctgacagcgtcacaagcgttgctgcaatggtttgaataaacgctgtgttctgttccttcagcttcatttccgtttcctctgaagcatgtttggaatataatgagccttcttctgttcttgttttcagccattcttcggtcatgacaggggcttcttttaggataaattcatataattgcttagatttttcatttttcatttacttcttccgctcctttttcacttaaaactagtgacatacaacttttatgtataaatgaccgcagatggtgaacaatatcattacacgtttgatattgggctatagccaagtggtaaggcaatggactttgactccgtgatcgttggttcgaacccagctagcccagttcagcacaaaaacgaagacggctgaagaatgtttcagctgatcttcgtttttattaggaaactgattgatgaatcgctttcttttttgatattttcatgagttctccgggattatagcctactactaatttatttccatcaatgataattggcctccggagcagttttggtttttcaatgagaagctgaagaacctcgtttacttttaaatcattaatatttaaatttaagcttttaaaagcctggcttcgtgtggctaaaatttcatccattccttctgttgttaaggaaagaatcttttttaattcatctagggttggcgtttctctgaaaaggtgacgctctttaaaatcaatttgattcgcctttagccaatgttttgttttgcggcaagacgtgcagctcgggtatgaataaaaagtaatgtcactcattagtcttcctccttaggtcgttaaccttttctcttatggagtaagtaccctcatgtatttcggcataaacacgttttgatcactttttcaaaaaaattttttctacttgtaaaataaatgttcacacgttgtcaaaaatgtaaatgtttacataacaagtggtgatcagctataatatgaatcaaaggggtttttttaaggggagggaaagaaatgaatcgcatgttccgcgtgcttggcttttggacgggtatttttgctgtcatgttctatttagggcatatgaaagatgcatcgttgctgttcttcggtcaaaccgttctttttgtatttttatcctacttgaatttatccgaaagaatgtatatttacattttcggagcgtacttgacgattttctttgccggatttacatattattcgatcttcatcatggttcccggtaccggacattaattgaaaaaagcgtctctttaaaaagagatgcttttttcatacctgtgtttaaagagaaaaaccattgataaacggattttgctcctgctctgtgagtacagtggtttcaccgccatgtccacttaaaacaagagttgattctggtaatgacaacaatttgttatgaatcgattgaagcagcacttcttgactgccccctactaaatctgttctcccgatgccaccttcgaataacgtgtcaccagaaatcacaaatccttcttccgccgaatagtaagacacactgcctggtgaatgcccaggtgtatggaacatctctaatgtaaacgatccaatttgaagagttccttctgacgtaattaatttttctgcttctttgaccgtaattccattcccaatcaatcgagctgaaccgtttaattcagcgttcgtcagccattccttttcattctcgtgtacatagagtggcactccccactctgcacgcacctcatctgccgcaccgatatgatcaaaatgagcatgtgtcagtaagacagcaagcggtgtgagctgtttttcttttatataggaaatcagcttttgtgcttcaccgcctggatcaaagattaagcattctccgtgctcatttttccaaatatacgcattcgcttgtacatagcctagtggcattcttctccaattcattttcatcacctactttattcattcttttttattatgaaggctacacaataaaaattcaaacaatcgtcaactggaatctactcgacaagctttatgaaaacggttaaaatgaaaagaaaggaaatcaaggggattgatgacaaagggggactttcacatgatgctcgtcattatttttggtctagtcacgattttagctgcactcgggatctatcgctcacttaaaaaagtgaacgtacttgccatcgcttttgctggcgcgacatttttggtttttggatggtttactgtcatgaccatcatctatagcggttatccaaccgcacattaaaagcctgcaaatagcaggctttttttattgattcaagtgcttattcacgctttctattttacttgtaagcgttgtggtttgatcccgcctgtcatcaatgcggatattggtcgctacgcggtgcaatcccttttcaaaaggtgcttcatgaatgcgctgaatgacttcaaataaaacagataattcaccttcaattaacgtattcattggtgttaattgataattaattttcccttctttttgaaagccttctaaaattctttgtacatctgctacataagcactgacacttggtgtttcagtacctattggaatgatggtcacatctgctatggccatgtttcttgcccctttccattgaatcctcatgttttctcgtcctcattgtaacctattcacaatcaatcatgccatgctcacgttgcatttaaagaaggtttgtctcgttctatcgtcaaatccgccctctctaccttcccaatctttgtgaatagaagcaggcatatccctgacacagcttcaatgatgccgccagccgcaatgacatacccagacccaaatagtgtcgccatatagccgccaatgagagcgcctaacggaatcatgaagaaggagatcatgttgataatcgcatacacttgcggctgatcctctgcttttactgacaattgaatcattgtatgttcaggcacgttgactgcactgatggcagcccctaaagcaaaggctgatataaacacaagtggtaaaaatgcgttcatgcctgtgatgaagaacgagattccatcaacgatcccggcacctataaacagcagcccataccggttcacttttacctttgtcaaaacaaaccccatcaagaaggcacctagtgccgttgtgactttaataaatgaatagatactggtccactatgtaaatcctctgttaaataaataacagacaatgcttcccatggtgctgcagcgaagtttgaacagacacaaaaaatcgccaatggaaacaaaatatgatgccttttaacaagtgaaaatccccgaattaatcttttgccgtatgataacccttttttggctttatcgatgatgacttctgtttcatatgtaatcattaataccaataaagcggagaagagataaagaggaatgatcacaagcattgtataccctacccctacaaacgcaatcatgacaccacaaatcgttaccgtcacaagcctgaccacatgacttgctgattggatagttgcattcgctttttgtatgaggtcctcatggacaagctttggaataattgatacggacgccggttcgtaggagccaccagtcgccgaatgaagcagcatacagccaatcacaagtgctaatggcgtgaaatcataaaagtaactgaccacgatcacaaggattatcgctcctcttgttaaatcagcaaaacacatccaaaatttcaattgatgcggcttcatcattggggtaatcagcggcccaacaatggcttgcggaacaaagctgaccgcaataaaaaaagctgttccaattgcccctttcccgcctagtactaaaagccacaagatggtgttgaaagataaactatcagctgttattttgcacattttagaaataaataagtaagtgaaattccttttccacaggctttgagcactcaatgttcgacatctccctaaaacatatccttttttttacatccgtacttttcacaatagctcacaaggccgccttcgtcaattgctctaacattatttttattgacaataagaaattgattcacgttcaaatgtaaaaagcacctgacaggtgctttttaacacttacatgcttcccataacagccgctttgttttctcatagatggtgtcaaattgattcatggaaagaggattttttcctagaccaagctcgactgtatagccctcattgtgaaattgataaataaaccaatcgcgatagcctgcatagctgtcaagatatcgaaccggtttatagccgcttacttgctcgaatcgtttgaccgtttcttttgagatggcaggttcgtggccaagaaaaccccagtatatctcttctccttgtgtatggagagcgatcagccggtcaaagcgttttcgtaacgctagatttgccatcgctttcgcttctggttctgttaacggctcgcgccctggaaacccccgattggacggtgccttaggctcatgacggtagtattcgacctcccaataagctggaaattgattgttcaaatccacccctcgaatatttgctttccactcctgataatcagcatatccaccatgtagcggtgtgaattcttcactgctgagacctagcgactcaggtccattccgaacgaggtctacgccatctggattcaccattggcacgatggagagagctgtggttcgcagaatatgaacggcttcatgatgtcttgcttgcaccgggtcagatgcggctaaacacagcgatttcagccattttattaaaacagacgtcgtgatccattcatttgcatgaaaagaggcattcaaatgaatagaatgtaaatgctgaacaggctctgttcggatttcataaataggtgtatcaagcactgaatgacctattatgctgatttgaagaaaaggaaatgcggctttcaagcggctcagctcttcttctaattgagcactatcatattcaaaggttccattgatccaatcatcggattgctgcagcctgtaaggcgcaataaatttctgcagctcacctatggaagaaaatgaatggatgccttccggaagtctatatcccggtaaaagaaggtgatcagtgcttgtttgattggataaatgaaaagccgcattccctatccctaactgttttgccacattatcctttcccgcttcatccagctgccattcaattttcccaaacgacgttgtcttcatttacatccctcctctcatactatatgagccggcagacaaaaaaagaaaacctctgcatctaaaaatagcagaggttttctcatatgttaggacgcctttttcagcttcgtttcatcttcttttttggatggagaatggtccgggctgttccggtcataaaatctaaggagatcaccgtagatgatttgatcagagaattgaagctcttgctttgccttctcttcataagactgacaaacggtctcatcatctcttggctcacccgtttctttattgtagcaaactccatctgtgaaaacactgtccttcgtaataaagctgccatcacgaagcacggtaaagtcattcttatcttttgataaaagatcatgaccaaattgaatctgtttacttgtatcaattcctaaaagattgagtatagttggacggatatcgacttgaccgcctaccgtatcaatttcttttggatgttgatctgtgatccctggaatgtgtacaacaaacgggactttttgaagctgcacttcttcaaatggcgtaatctttttatttaaaaattgtcccattgcttcgttatggttttctgaaattccatagtgatctccatataaaacaaagatggaattttcgtacaaacctgtttccttcatcttttcaaagaaaatcttcagcgcctcatcttgataacgcactgtaggaaagaacttgtttaacgttttgctcttagaatcatattcatcaatgagcttatcttcttcatctagatcaaatggaaagtgattcgttaatgtaatcaatctcgtatagaaaggctgcgggatcgatttcatcaattccgctgactgttcaaagaacggaccatctttcaagccccagccaactgagttctcttcattcacatcaaatgatttaatatcaaaaaacttatcgtagccaaagctatcgtagatcaggtcacgattccagaaacttttgttattcgcatgaataacagaagagtgatacccctcatcctttaacaactcaggtgtggctgtatactcattgcttgggtttgtgaagaacacagcccctcttccaagtggatagagagagttatcaacaataaactctgagtccgatgttttcccttgacctgtttgatgatagaaattagtaaagttgtagcttttcttgattagtttgtttaaaaatggggtaatttctttcccatttaatttttcattgaccacaaagctctgagtagactctagggagacaagaatgacatttcgccctttcgcttgaccaaacgttttttcattacggtcggtttgatttgcgcttacatagttttcaatttccgttaagctattgctgtcggcaagggctcgttgagcagactgcttcgattgcaacactccatcataaatatggaaattatataagctaatatttttcaccagcatctcacggtcaaatgagcgagtgagcagttctggtctttctgtttcagccaaaccaaggttaaagaagaaagtggctgccacaaataaataataagctgctcgttcttttcgtgaaatggtgacatccgttctaaaggaaggctgctttttatagagccacattaaaatcataatatcaacgaacatcagaaaatcgactggttcaattaaagaggtaatacttgacccgaggtcacccatattgtttgtttgaaataggacggggatggttagaaagtcactatagaatcgataaaacacaatgttagctaacaaaatgaatgtcaggataaaactcatcacgatgatatatcgattgcgatttttttctttcataaataaaccgataccgaagataaacaagagaaagctaagcggattaataaacaggataaactcctgcatgaaattttctattttaatattaaagctagatttatagataacataggttttgacccacattaacaatgtcgcaatcagtaaaaatgaaatcgcctttaatcttttctttcgcattgtaacctccttatgctctaagcatgcactcaagttagggaataccctaattattggtgcttcttcaaaaataactaaactatatcttatcctgtatgtgctggaaaatcaatgtctttttcctcatgacaaacttataaatatgctaaacatttcatttcatgcccatctatcgcttttttaataaaaatgacatcatgatgacttttttgtttaagacagccatttgttttttgccatccatgcaccaccgatgactcctgcatcgtttccgagtgaagcaatcacgacttcgacatcatcagcgcaaggcggaaatgcgtgatgtttaacaacgcgctctactttactgcgaagaagctcccctgcttttgaaacaccgccgccaatgacgatttttgttgggtttaacgcactggcaagattcgctaagacaagtccaagatgagtcgtcacttcttctacgacacgcatggaaagatcatctccactttcagcggccctaaacacatcctttgcagacagcgaagtgagcgcgccaagtgaagatgtatgctgctccctttctaatttatcctttgcaagccgaacgatgccagtcgcagatgcaatggtttcaatacagcctgttcttccgcagttacacggtgctccttggaatggaacggcacaaatatggccaatttctccgccagccccagtctcaccttgaacaacttcaccatttacaataataccgccgccaacacccgtgccaagtgtgaccatcaggatattttttgcgccatctcctgcccccttccacatttcaccgagtgcagcaatattcgcatcattttctatgacagatggaagtcctgtctctgcctccaggtgatctttgagtggatagtttgtccagccgagattcgttgttttatagacaatcccagatactttatctacaggcccaggtgcacccattccaatcccaataagcgctgattttggcatactgatttcgaccagtttgtggtcaattgatttggcaatatcgactgtgatcgtctgccctgatttatccgtaggaatctcccacttatgctgaatttcaccatatagattaatgaacgcaagcttaattgtcgtaccgccaagatcaactcctacaaaccaatcccctatcatatgccctccaccttcacattgtttttcgatttaatttggctagttccatttgaagaatagtcattgcgtttgaccattcggtccggtcaataatgcccgatgtatacatttccttcagttcatctgccataaattctaattccacttcacgatctccgaaatacacataatttccaaatctcatgagcagctgctgtacatcatataacgttttcattatttccaccatttcttctcatcaacagataggataagcgtattcataaatgcgctttcagtcaagtcattcaatgtgtttgcgtgctttcaatatattgtttcagttttaaaaattgatcattttttggatcttggtctaaccctttctcgattagatcctccgctttcgctgtctctcctttttctacgtacaacaacgataaatgatacagtttatttggatcatcaggatcttttttaagcgacttttgtaaaaattcaatcgctttgtcaaggtggccgagctgcgcttcagatagtgcatatatatggagagcatcagctgatgcatccttttggtgtacatgttcctctaaccgtttacttgcttcgttatagttcttctcatcaaatagacttgctgccttacttactgccgccgcttccttttgatcgtctgaatgaaaccctgtatacagtccaaaactgccaatcaacagcaaaacaacactagcaacaaacattttgacaggctgcacctgtttagggagccggacagctaaagcggctaaaaaaccgccaaccagaccgccaaggtgccctgcgttatcaatacctgatacggtgaagcctatccctaaattgatcaggatgatcacaataatatttgtccccatcgttcgaaagaatagcttgcggttagaaattgctaaatataatagcgcacctaagcagccaaagatcgcacctgatgcaccggctgcgatggccgtattaaagacaaagctcgcaatggagccaaaaatgccggaaatgaaatagatgagcaaaaatctccctgagccataaattctctcaacagccgctccgacagaccaaagagcaaatgtattaaagagtaagtgcgtcaagccaatgtgcaaaaacattggtgtaatgaggcgccaccattctccatctaagatcagcccattatttttagcaccaaacgctgttaaagtcgcggtattggtacttccgccagatagttcaagcaaaagaaacatcaccacttgaacagcgatgagcaagtaggtgaaaatcggtctgccattttgaaaaacggcccgttctcgttcacgctgcttttcctgatcattaaatgcttgaagtacattcattttaagctgcatgacatcctcagctgtgtctctcttcgcctcttctacatccaatgttaccgaggtgttcagccatttttgcagctcgtttacatcgtgctgaagagtgtctgcgttcagtaatacaggtgtaaccgtcaccttttgttttttctgcggctgaccgtttaagtcttcccaatcatctacaggatcgtcagctgtaaattggagctgcaagagatgaagagaccgtttacgcatcgcctctctcagctgattcacccgatacgtctgctcttcgatatctcgaacaatctcctgtctaaaattcacatcttttctatatagacggatgagatcataccctgagtttcttggtgcttcaaaaaatatttcatcttctggatacggactttgaatcatctcgtaccctttttgccttaattcatcaacaactcgccaaaatagactatctatgacattcattcattcgcgctccattttttacattattataacaagaatcgttctgatccgcatttctgaacaaaaaaatcccggcttctgcgggattagaatgcttggcgaataaatttcgtccgaaaatatgggattttcatcagccacttaataaaaaagtgacgcacttgattttgacctaagatcaaattcatcagccgataacgattttgcacgagaacgaatgcaaacaatgtgaacacaatgctccaaatcattttattcatcatattccctcctatgttcgtatcgtggcttaaataggatttgtttatgcatgaacgatcatttttatcgcttacaatggttcttttcattagccggctttcacaatctaatcccttgttcttttgattgaatataatagacctcttcacactctgattgatcataagaaacgtcattattcacttcctcccacatattacggaagtatcttttctttccacgaaattttttcaaaacggacctcctagcaaaatgccactacatgcagatttgttgatcaatgtgaaatcatattgcgtttcaccctaccgttactacaactctgatgaaaggatctcaacacaaaaagcccgttctttggacaatcagcggacttttacttttgatataatatacctttttcactgacaatcatagacaccggaatgtcgtgtgcttcagacggcacatgactgatttgctgtaaagacagacaaagtgcaatggttacaccgtgatagtcagctaagtagcggtcataatagccgcccccaaatccaatccggtagcctttttgatcgaagcataccccaggcacaatgattaaatcaatggtttctttatgtacagctgttgatacttgagggtctggttccaatagcccaaagtagctggatgtcatctttgtttgcggtgtatattcataaaacatcatctcttttgttttcggaaaacaggtagggatacatactgtttttccttcttcccacgctttttcaatcagaggcattgtcggtatctcttttcctctagacattgtcaaagcgatcgttttcgcctgtttccatgctggcagctgcaataagtactcatgaagtaaagccgtgctgcgctcaaactcttcagcgcttatctgatccagcttggctaatgtttgaaggcgaagctcctttttcataaagatcatctcccatcataaaaaaacagcaggaaaattccctgctgcttactttgtttcacgatgtaaagtttgttttttatcacgtgagcaatactttttgaattcaacgcgatctggattgtttcgcttattctttttagtaatatagttacgctcaccgcattcagtgcaagctagagtaatatttacgcgcatatttttccctccaaactaaaatcaattcacattcagacctaactataataccacttctagcttaggaatgctagaatgttttttcaccaatttcattttgagtgcattcacttacatatcgcatggttatgtcatgaaaaatcgtctgctcccctataaaaccttatcctttgtcgtactgtatacatgagacccctcttctccgcgcctctttcatttattttgacagcgaagcaaggtttcatacccgttttacatataaaaagaaaaaagatgaaaaaaaggtgattttcttcagcaattccttttgaaactagcttttttatggtataaaaaagaagggtcgaaaactgtctgaaacaatcttgaaagccttttatggctttcagcataaaaatatgaataaaaggtgatgaaacatggaaattgcaattatcggattgcttgttgtcagtattgtactgatcgcattctcatattttcaaagagagccgattaaagaagtcgagcaggaacttgaaacacttcaactatctgcaatgcaagaaatctataaactgaaaaagaaaatgaaagtgcttgaagaagaattacttgaaacaaacatcgtcgttcgcaagcattcagaaattgatccacccatcgcaagacagatcatttcaaagcaccaaaatggcatgtctcctgaggccattgcgcgcgctgagcatgtatctgtagaagatgtcaacatgatcattaaagacaacgagagggtgcttgtatgacgaaaaaaagcatccaaacgtttgcagcaggtatgattcttgcaactggggttcttgcgattgtcttttttctcactgggaaagacgaggcagcagctgatacaacaacaaaagaaaccctcgcacagaaagtaacagacactgacgtgaaaaactatttagactccaaaaaagaagtcactgtcagccgtgaaacgtaccagcagcttcttgactataaagaaaaagcgctgaaggcaaatgaagacggcgattctaagagtgataaacaaaagcctaaaggcaaatcgatcaaattcgtgattaaaaacggtatgagtacaagtgatgtttcagacatgcttgaaaaggacggcatcatcaactcgtctaaagattttaatgattacgtaattgacgccggctaccataaagaaattcgtgcaggcaagttcaatttaaaaacagggatgacgttcaaacagattgtcaaagccttaacaaaataacaacaaaagccccctggcggcactgacctccagggggcttttcttatccaaatcgaccagatatataatcattcgttctttgatcgtttggctcagaaaacatcacattcgtatcattaacctcaacaagctcccccattaagaagaatgccgttcggtctgataccctagccgcttgctgcatgttatgcgtcacaatggcaattgtatatttctctttcaatttcataatcaattcttcaatctttaatgttgagacaggatcaagcgctgatgttggttcatccattaataagatgtctgggcttgtggcaatggctcttgcgatacaaagacgctgctgctgaccgccagaaagacctagagcgggcgcacttaatcgatctttcacttcatcccaaagggcaacatctcgaagcgctttttcagcgatttctttcaattgctgcttgctctttactccgtgaattcttggtccgtatacgacattatcaaagatagactgagggaatggattccctttttgaaacaccatcccgacatttttacgcagctccactaaatcgacacggccttttaaaatgttgtcaccgttatacatcatatccccggtgattttcacacctggcactgttttgaccataagatttaacgttttaataaacgttgactttccgcagccggatgggccgataatcgctgtgacttcatgctctctaatcgctaagtcaatatgcttcaatgcatgatgctgtccataccaaaggttcatatcattcacacgaaacacttctttttttgctgtttcagttgctactgcattcatcaaaatccacccgccttatccaaatcgaccattgatatagtcttctgttttttgctgcgcaggacgtgtaaagatacgttctgtggcatcatattctactagatctccgtttaagaaaaaggccgtacgatcagatacacggagtgcttgctgcatgttgtgtgtcacaatgacgattgaataatcatttttcaattcccctaatagttcttcaattttcgcatttgagatggggtctagggcagaagccggttcatctaatagcagaacactaggtttcatcgcaagtgtacgtgcaatacaaaggcgctgctgctgaccgcctgacaatgacaaagcagatctgtgcaaacgatctttgacctcatcccatagcgccgcctttgttaagctttcctcaaccgcatcatcaagcacagattttcttttttccccggcatactttaacgcatgggtgatgttattgtagatcgatttaggaaatggatttggcttttggaagaccatgccgatttctcttcttaaattcaccacattaatgcggtcatccaaaatatttaacccttcgtacatgatcgccccttcacttctcgcacctggaattaagtcgttcatgcggttaatgctgcgtaaaaaggtagacttaccgcagccagatgggccgattaatgcggtaatcgcattcttctcgatctcgaatgaaatgtgattgaccgctcttttttcaccataataaatgcttaaatcctgcacctgtaaaatctgttccgcttgaagtggagcctttttcgctgcaatttcttttttttctgccagcatttgaaccatatccccttcacacctctctcacattattttgacgtaagctttttatgaataaatgaaccaagccatctagctgctaagttgaacaataagactgaaagcacaagtacggctgatgcaccatttgcaatggcttctgcatctggaatgattccttgtgtattgacgttccatatatgaacggctaatgtttcagccggtctaaaaacattcagcggtgacgtatcagaaaaaggactccagtttgtgaaatcaaggcgcggtgttgagagacctgctgtaaaaagaagagctgccgcctcaccaaagactcttcctgatgctaaaatcgcaccggtgattatagacggaagcgcacctggaataaggaccgttttgactgtgtgccacttcgttacaccaagcgcaagtgatgcttccttttgatccttcggtacagagcgcagcgcatcttctgtcaccctgaccatcaccggcaggttaaacacagtgagcgcaagagctcctccaatgatcgtatagccccagcctgttaaattcacaaacatgagtaaaccaaacatcccaatgacgatagacggaagtgaagacagcacttcaatacatgtacgaataaaatctgtgactttgttttgaggtgcatactctgccatatacactcccccgccgacgccaagcgggactgtgatcagcatcgtaataaacaaaatataaaacgagttaaacagctgatccctgatgccgccgccagagccaatcgcacttgagcgggttgtcaaaaagtcgaaatttaattcttttgcaccgttgaaaatgatataagaaaacaaaccaacgagaatcgccgtaataatggcagcacataatccaaatataaatgtggcaaaacgatcggtcattttgctattcattaaatcttcctcctagacgacaagtatctgataatgagtatgaacataaatgatacaactagaaggacaagtcccattgaccaaagtgtattgttctcaacacttccatacgttgtgtgacccatgtttaacgtaataatggttgttaatgtaccagctgtatccataatgctctctggtaaattacgtgtgtttcctatgaccatttgaacagcaagagcttctccaaatgctctagccatgccgagcacgaccgctgtcattaatgttggcagagctgccgggacaagcacacgtctaatcgtttgccatcttgttgcgcctagtgcatacgatccctcacgtaaactttttggtagtgaagccattgcatcagtcgcaatggatgtaacggttggtaggatcataatagacaggacaatcgttcctgctagcacgctatgtcctgagccgcttgacttgaaatgtccgataaacggcaccaatactgtaagacctatgaatccgtaaacaacggatggaatccctacaagcaattcaatgactggctggaggattttacgtccccaagcaggtgcaatttctgtcataaagatggcgcctgcgatgcctagcggcgctgcaatgagtgccgataggagcgtgacggcgattgatccaaagataaacggaaatgcaccgtactgcgggttttctgctgttgggttccaattgatactggttaagaactcaattgggcttacaccatttacgatgaaagattgtaaacccttaatgccaaggaagatggtgatggcgatggatacagcaatcattaagaatgcgcagaatctcaccaaaatacttcctcttacttcatccatttgcctatttttcttcgagctgatcagtcgatcgctcgcttctgtatgttctatctgcttcatctttttctacactcctatgaatgtcataaaaggaaaagtgaaaagctccacttttccttcatcagcaattcaagacctcttacttatctgtttgtttgcctgttgcgtctctttctactttcatattagaaactgagatgtagccttggtctttgacgatttctttttgtacttcatcactcatgaggtaatctaagaattgttttgctagaccatccggctcaccttttgtataagagtgctcgtatgcccaaattgtatatttaccgctttctacattgctttcttccggtttcacaccatcaatgctaagcggtgtaattttgtcatctgttaaataagagaatgctaggtatccaatcgcacctggtgtttcagcaatcagttttttcactgtgtttgaagaatcttctgtgattccttctgcaggtgttgcaccatcaagtgcatacttcacaaatgttgcacgagttcctgaagagtcaggtctgttcacaagagtgattttttggtctttcccgccaagctctttccagtttttgattttaccagtgaagatttttttcaattcgtcctttgtgatgtctttgacacccacttcagggtttacagctgcggccattccaacaactgctactttgtggtctgttaaagcttttgcgtcgattccgtctttctcttctgcgaatacatctgagttaccaatttgtacagatccttctgacacttgagaaagtccagttcctgaaccgccggcttgcacttgaatatcggcttttggatgtttatccatgaatttttctgctgccgcaagaactaaaggctgcatcgcagatgatcctgagatggtaatggaacctgatgcctcatctttgtttgaagcatttcctttactgtcttttgaatctccgcttgagctgctgtttccgcatgctgtgacgaatgctaacaatgcgatagtaaggaaagtaagcagccataatttgttctttttcatttcaagaataccccctgaataatttgtcctacgagtaatacattaaaggttctttattaatttcgtttaaatggaatgttaaggttttgtaaatgtcgaagttttgtagaattcttgcgatgttttttatgcattttgtcaatttatctcgaataatttgaagaaaacgtaaaaaaacgcccacaaaaagtgagcgtttttacctagaaaaggtctagtcatttgtttctgcttcattttcaattttatttttgttcttcgcttgtgtatcattgctttcctgttttgatttcagctcaaagtacttgtctagtacttgttcaccgatatcatttgtaattggatagcgctgattgtagtcttgatacacccacggtacaacgacggaaatggccacttctggattatcagcaggcgcatacgcaacaagagtggtgttatacgtcggtgtgccgcgtttgcttttaattgggccgtcatagaatgattgagcggtccctgttttgccagccgggttgtattttttgttgccaaagttcgaataggctgtccctcgtgggttctgcataacaagcttgaagccttgctgaacacgcttgatctcatcactcgtcatgtctagcttattcaatacgtccggtttgacggattctgtcacagcaccaatgccgcgctgcggatctggctctctcacttctttaacaagctgcggacgtaaacgatatccgccattggcaactgttgaaacgtattgcgccatttgcagcggtgtaaacgtatcatactgtccaattgcatagtcaagcaggagaccagattgtgtagacgttccccggtagcctgtcgcttcgtttggcaggtcaatccctgttttgaccccaagaccaaatttactgaaattatagcggaatgtatcaaaagctttcggatcgattgggagcggttggttcttacgatactccccttttccaacggcaatcgctgttttaaacatatacacgttagatgaacgctcgagtgccgttaaatcattaataagtcccatattttgataggatttcttgggcggtgactgcgcgatatatagcggttcatcgtactgggtacttcctatgtgaagcacgcctgttttatatcccgtcagtacagttgcccctttgacagctgagcccatcgcataagatgatgtcatcgttcctaatgcgtagtcatcaaatttgtattttccgtttttgtttgaaatctgtttccccgcaactgagagaacctctccatttctcgggtccatcatgacaacaaacgcgcgatcaagaagctctgttccgcctctttgtttcgcacttctcaagttcttttcaacgattttttcaaccgctttttgcagctgaatatcaatggtgagcacaagatctttcccgctctttccttctgttagcactttagagcttgtcacattgccctctttatcggttgtgctctgttctttttccttttggccttgcaggacatcttcatattgatattctagatagctttttcctacacggtcatttcggctgtagccgagcgataaataatgttcaagaagtgactgcggaagtccttcatcacttgaggacacactgccgagcatactgcggagcagtcctttatacggatagctgcgtgaccagtctgtcgtgacatccacacctggcagctcgtccaaatgctcagagacgtaagcaatttcgcttggcttcacatcttcatttttaataaactgaggcgtaagtgcatagcctgcatccatttgtcttttaatggcaagcacttgtaagtcttttttcgtcagttgatttaattccttgtccgtgatgcgttttagttgaagctcatatagtttatcatcagagaccttatcgtcaccctttaattccgattccttttgaacaagctttttcgcttcattcggatgcgttaagatccagaaatcttttttgtcacgatctgtgatttttttcgtactcacatgaatcatatccgctaattttgttgccactttgagccgctcttcttgtgaagttgtcgaggttctcgtatatgtaatggcatttagcgctttattgctgacaatcgtattatagtttcgatcgtaaatttttccgcgcggagcagatgagctgacattcacatcttcttgtttttctgcctgctttttataatcttctccattgacaatttgtacaaatccgagtctcacaacaacaccggtaaaaataataaacgcagctaaaaatagtaaattcagccggagtggaagtgttttgcgcccttcctttgcgtcttttttgtttttcttgtttctcatcacatcaccttttctatcaagaaagaaatggcacccctttttgtgtataaaaggtgccatcatcattttagcggtttttctattatttatctagaaatttgatgttccattggtaagaaattttacctttctcccttaataaggttcgtgtgagaaactggcttttgaccgtcagtctctttcatatcagctgttttttcttttaaatgaatatcttttacaaaataataaatgagtgtgtgtcccgctccaagcacaacaagagaagcaggaattccgagctcatcacctagtaaggtgacagacagaagaaacaacacaatggaacaaatacggccagcatttaaaaacagctctctgaccacaatatattcaattcgggctttccttgcataccttgcatgaccgatgacatcgtatgttaaggatacatatggaacaagcagaagcgggtatcctatcgcaatggctaccgcatacatgagaagtgatacataggacaagtgaaagacgattaagaacaaggcgccgtataaaatcagcccgccaagcataatggctttctttcgccactttttcttaatcaaacgtgtagcgaagaaataagcgaaaaaggcaacaccggagttcactaaaccaaacgtcccgagagcaagctcactgtttgttgcgataaacacaaagacactgattaagaagacaaagaccccttcacgaagcccttgaaaaaagtgagctgttgtaatcttacgccaattctcgtcggcatggcgttctttccatatttgcttgatgataaatttcccttttgactgccttctcttgaggaaaaagctcatcacaaccgccagtgaaaacaaaaaaagcgataacgtgaaaatcaccgtatagcctgtatcatccgttaattgagaaatgacaatccccgcaatgagaggaccgatcatgccagcagtagatgacagcactccgagaaacccattaaagaaatctcttgtttcaggctcagtgatctcaaaggtaagtacgttaaaagcaagccagtaaaaaccatagccgatcccaaggacactccctaataaaacaagccgcgcggccgcttgctctcctgccattaagacaattaagtaaaaagcggctaaaaagataacgccgaaacgaaggacaaacgcccggtctatttttttagcgagccggcctgcgaataaaaatgtaatgggctgaagcacaacaatagccagattgtaaatcgcaagatccgtgaatttcccagactgtttccataaatacacgtttacaaacgtatttgaaagcgcaatggcaagtgcgtataatccgccaatcgtgaggaggagcattaaatctcttgtaacatccatgtccccgaacattttctttaatctgctcatatatttcattctccttttctacacaatagtctgtctcatcaaaaggcagatatgtaaaaaaaggagggaaaatataaaaagacctgcttctctaaagagcaggtcttttcaaatcaaatgatttatttagcttcgctgtaaaggcgagccacttcatcccagttcacaacattccagaaagctgaaatgtaatcaggacgacggttttggtagtttaggtagtaagcatgctcccaaacgtcaagtcctagaattggtgtttttccttcagttaaaggagaatcttggtttggcgtgcttgtgatttcaagtttgccattgttcacaacaagccatgcccaaccagaaccaaagcgtcctgcagctgctgcagcgaaatcagatttgaatttttcaaatccgcctaattctttttcgattgcatctgcaagttcaccagttggtgcgccgccaccgtttggtgaaagaagcgtccagaataatgagtggttagcatgtcctccgccattgttacgtacagctgtacggatgttttcaggcacagagtttaggttagccactagctcttcgattgattgatcttcaagagctgatacaccttcgattgctttgtttaagtttgttacgtatgtgttgtggtgttttgtgtggtgaatcgtcattgtttccttgtcgatatgtggttctaatgcatcgtaagcatatggtaattctggaagtttaaaagccatggttaaattcctccttagaaatgtatgtactgaaatgcttccttaggtcgtaagcaagcaattcaacctactcaaagagtatcaaaagaattggcttgtttcaatgttattgctcatgatctgaaacatttcagtgtttattttgtatttagccctttagaaaaagttttaaactccctttttctatttagcgaaggacataaaataaaaagatgcccagcatcagcgcttgaatcaatcctttggcaaatacacctgatataaacccgattaatgagcctaatcccactttcacactcgtcttcacatctttttgatgaacaaggagctctgcaatgacacttccgataaatggaccaatgataattcctgcaacgggaatcacaaaaggaccgactaataacccaatggtgcttccccaaatagctgcacgactgccgccaaaacgcttgaccccaatgaggtttgagacataatctgccgcaaataataccgcggtaaacacggcttgaatgagccagaacgtcagtgtaagcggctcgaagctgaaaaagaaaccatatagaataaatccgagaaccataaagaccacgctagggataattggataaacaagtccaacaaacgcaatgataaatgcacagataaccagaatccaatacagcacgtccaagtcactgccgcctcctttttatatgctgtatacattatgcctcattccatctatcttaaccagcgatgaaggccatacttgtacttgatagatagacattgatacaatatgagaaatagaaaagaatgtaggaagtgaattgattgaacgtatttaatctattgttaaaaggcatttattctccaaaagatattgctaaagcacggtttacagggattggcaaagcgattttattcatttttatcctttcgatcatcgcagcagttcctcagggttatcatatgagtcaagaaatctcgaatgcgatgtcaggatttcagcatgtgatcaaaaaagatttacctgatttctcaatcgaaaaaggaaagcttcaagcggatcaaagtgaaccgatagaaaaagaagaaaacggcattacgatcatttttgatcctgctgaaaaaataaaagcaagtgagcttgaatcaaagcaaacagccatcgcattattaaaagaaaaagcagtgattgccattgatggccaaatgacagatatcccgtatcaacttcttggcggaacgctgacaaaagacgaacttgcccgcgtcacaaatcagaatcaagcgattattatcccagtcatctgtgtgctgctatatctatcaactgcggctctcatgttcattagcgcaactttccttgcgatgcttggtacatttattaaacgcatgcagcaaaaagagctgtctttccaaatgctttggaaactctctgcttattcactcacattaacaacggtctttttcgccatcatgagtgcattaaacacgcctgttgcgaattcatttttattaaattgggtcattaactttatcttcttataccttgtcgtaaaggaaatacccgctaaacataaaccacttgtcaaaagttaatgagtaaatgaaagctcccccaacttggaggagctttttatgtatgttcatgctctatgattcatctggatgaatcatcgcaaacaaataatgatcctcccacacgccattaatctttacttttttacgattcagtccctcattttcaaaacctgtcttttcaagcacacgaatggaatttatattacccggctttactccagcctcaatacgatgaaggtgcagttcatcaaaggcataatcgatgattaaacgaatggcttctgtcatataccctttcccgccatgcttttcatcaagtacataccccagccaagctccttctattgggcctcttacgacagaacttaatgagatcgtcccaattaaggcatctgtttcatttaagaaaataccatgcatgtaagcttcatcccgtgcacatctttccacactgcgctgaattcgttcaatttgacgagataacgtgaaaaaatcatctttgaccaaaggtgtaaattgctgaaaatatgagcgattctcaagttcaagtgtgaatagtgattgtgcatcattttctgttagcgttctcacatatatatgctgacttagtttcttcataaactcccccttcttttattttatcataatggtcatagaagcttgaaaaaagcaccgccaagcgtaaaacaaagtgttttttcaattcattacaagactcactagaactaactagaaccacgctttccagcttttctcctcattttggttctatcatttcaggacatgcatagactgaagtaaactcttaaaagcggtgagtgaaatgcggcgtattatttttttgctaatcagtttgtttgtcctttttattatcttttttgatttaaaaaatggcaccatccctgttgaagaaggtccagctgtccctgcaaatgcctttcaaacacctgagaaaaaagcatataagaatgtgactgtgaaacaaggtgaaaccgtcgtctctatcgtccatacaagcaagccacttgatgaagtcattgaagattttgaagagctgaatcaaggcgtcaaagcaaacgaaattcgggcaggcagcacatataagtttccggtgtataagagataaaacgttaattccttgtcattcatacaaagagactgttacaatatgaactgtaaaacaagacgtacatggcaaatgattgcttgtacactaaggagcgattgacaagtgagtgaagtcacacatcgtactaaaacgcgtcccgtcaaagtgggacctttaactataggtggaaataatgaagttgtcatccaaagtatggcaacaaccaaaacacatgatgtcgaagcgacagtagctgaaattaagcgtcttgaagaagcaggctgtcaaatcgtgcgtgtcgcatgcccagacgagcgtgcagcaaatgcgattgcggatattaaaaaacaaatcaacatcccgcttgttgtcgatattcattttgactacaagcttgcactgaaagccattgaagcaggtgcagacaaaattcgaatcaacccagggaacatcggaagacgagaaaaagtcgaagctgttgtgaaagcagcaaaagaaaaaggcattccaatccgtattggggtaaacgccggttcattagagaaaaaaattcttgataaatacggctacccaacagcagatggtatggtcgaaagtgcactgcaccacattaaaattctagaagatctagattttcatgatatcatcgtcagcatgaaagcatctgatgttaacctagcaattgaggcgtacgaaaaagcggcaaaagcgtttgattaccctcttcaccttgggattactgaatcaggtacattatttgcaggtacagtgaaaagtgcagctggtctcggcgctattttgaatatggggattgggaatacactccgcatttcattaagtgctgatccagttgaggaagtaaaagtagcacgtgaactgttgaaatcatttggtcttgcagcaaatgcagccacactgatctcttgcccaacttgcggccgaattgaaatcgacctcataagcattgcaaatgaagtcgaagaatatatctccacgattaaagcaccgattaaagtagctgttcttggttgcgctgtaaacggtccaggtgaagcgcgcgaagctgatatcggaattgctggagctagaggcgaaggcctattgttccgtaaaggtgaaattgttcgtaaagtgccagaagaaacaatggttgaagaactgaaaaaagaaatcgataaaatcgctgaagagcattatgcaaaaatggaagctgaaaaagaaaaagcgaacgcataacaaaaaacgcctgacgtcactgtcaggcgttttcctgttcttgttaaaagaacggggtgataaatatgccaaggatgacggaaacaattccgatcccgattgaccatgcgccaagcgcatgtgctccttttcttcttgcaatataaccaacgacgattgccgctactcctaatagcaccggcaagacaaatagtgagataatcgcaattgcgagtgctgtatagcctatccccttactgcctgaatcgtcacctgcttggtcacgttctcgtctgtctactcgatctcttgaagcctgatatggctctgcaatttcagcagctgtttcctctagatagccatcatcattactaaagtttgtgtcgatttcacgatcatttcttctgaaatcttcgtctctttccatgatcaattcccccttttggttaatagaaaggagcttttttagtatgagcaaaaatgtctgtttcatgtttgctaaaacttgctggaattgtgaattgattatgttacactttaagagtataaaaatgaggagtgtgggcatgttacgtttaggaattgatatagatggcacagtgacggcgcaggacacctttgttccctatttaaataagtcgtttcgatgtgccatgacactagatgatatgacagaatatgatttgacgaagcttttaaatatttctcaagaagaattttggggctggatgaatgagcatgagcctcttatatataaacaggcaaagcctgctaaggatgcaaaagagattcttgatcaaatgaaacatcaacacaggctgatttatattacagcaagaaggcagcatcacgcggatatcacctttgagtggtttcacaaacaccacgtgcactatgatgacattgagctggttggcggtcatcataagctcgaagctgttcaaaagcacaagattgatgtgtttttcgaggatcatcatgggaatgctacgatgattgcaaaagaggctgacattccggttattctttttaactccccttataatcaaatgccccttgacgacaggattatacgcgtcaacaactggcaggaagcatctcaatggatcaaacaatacgagcagcgtttggaaactgcttattaatgtagaaaagccgatactttaatatatcggcttttgattgtggacaaagaatgcaagggtttgtctacatgctgaaaccgatacgtttaatgtatcggcttttttgatggaacaagctgaccttctttcatgagaaaatggtacagtgctcccttcatgcctgcctgattcaagtagtagcacgtttccagcttcacctgaatattcttccatgcatgcagtgtatgtaaatgtttctcaatgcttgatagtaaatccggtcttgcacttacgccgccgcctatgaggattttctctggattaagaacagttgctacattgtaaatgccaatggcgattcgcttataccactgatccaccagcttctcaatggacggatcgtgctttgccttttcaaaaatttcttgaccgtctatttgagtactttgcggaattccttgcttttctttatagctgcgaattaatccagccgttgaagcactgctgttgagtgttgtaaattgtccattttctgtctctgtcagcatcatgccaaattcaccgccgcggaaggaagccccgcgcacaagctgaccgccagcgaaaagaccaccgccaacacctgtcccaatcgtcatacaaataaagctgtcacaatctttcgcatggcctctatatttttctgcaagagctgcacaattcgcatcattttcaacttcaacacgaagagatgttttctcttctagcagtgtttttacattttggccatttaaggcgatgatggctcctgcaaattctgtataacctgtttcactgtccacaaaacccggaagactaatagctattccgctgacatccgacgttctttgatattgcttgaccacatccgccatagcttctaaaaacggttcaagctgccggcagttcgtttgatagtcaccgctcgtgaccagctccccatcctgatccattaatccatgttttgttctcgtcccgcctacatcgaacacgacataatacgccacttttgacccctccctttactccaaaagacgcaaattgctgcatcgtaccttgttctcattttaatgaaacagccgccctttgtaaaacgttttcaaaaagacaaaagaaaaagccagctctgcggctggctttttcatgagtgaacttccttcggttcgcaggaaggacacgttccgtagatttcgaatttatgtccgctaatgtgataatcctctaaatcggcgtctagcttgtccataggacaggcatcgatctcctttgttttaccgcatgcaagacaaataaagtgatggtggtgatgagaaaatgagcatttaaaacgaaaaagcttctcccctgacaattccgttgtttctaatatacctaagtcttcatatagcgataagtttcgatatatcgtatcaaagctaagacctgggtagtcttcacttagtgccgtcagcacatttttagcggtcaaatatttatcagaatcagaaaacaattgaagcatatcttcacgtttgcttgtatatttgtagcctttttcctttaataaatcaagtgcttcttgtacgttcatgatgattcccccttctgaattttccaatactaatacatccgattaaaatcaaaatggacagcatcacaatggttccgcctggcgctaaatctagataatagcttaagattaatccggccaatacagacaattcaccgaacaagatcgaaaggaagatcgcttgtttgaatcctttggcaatgcggatacttgccgcaacaggaagcgtcataagcgcagagacaagcagtgtacctacgatacgcattgatgccgcaatgacaagtgcgacgactaagataaaaataaaatgaatccatttcgctgaaataccagaagcctttgcatgctcttcatcaaaagaaagtaaaaacaattctttatataaaagcacgacaactaacacaacaacgagtgaaatcccaacaataatccaaagatctaatctcgaaaccgcactgacacttccgaacaaataactaaacaaatcggtattaaagccattcgctagtgaaatgaagatgacggaaatcccgataccacctgataaaataataggaatcgcaagctcctgataatgcttatacacggagcgcagacgttcaataaacaatgaaccggcaacagaaaacgccatccctaagtacagcgggctcacccctgtaaagaggccaaactttttatcaagaaataagcttgctgcaataccggcaagtgatacgtgactgagggcatctgcaatcagcgagagccttctcacgacgataaatacaccaagtaagggcgcaataaagccgatcagcattcctgcgataaacgcattttgtaaaaattcataatgaaaaaatggaaatagcattattcatgtcccccatgatggtgatgatcgtgatgaatcacttgaatgtcatgtccgtaaaattgagataacgcttgatcatccattgaatcaaacgtttctgcatccccgtggaaatgaagtgtctgatttaagcaagccacatgggtgactttatcagacacggtgccaacgtcgtgtgtgacgagaattaaagacattcctttttctttgttcaatgtttcaagcagctgataaaagccttctactgtccgctgatctaccccaaccgtcggttcatctaaaatgagcagctttggctgactgacgagcgcacgggcaataaaagcacgttgctgctgaccacctgaaagttcaccgatgttttggtgctttaaatcttgtatgccaactgagcgaatggcatcctcaacttgccatttgtcctgcttgctcattcgtttgaataaaccaattttcgccgtcaatccacttgcaacgacctcgtaaacagaagcagggaaacccgtattaaaactattcgccttttgagaaacaaatccaatttgatcccagtctctaaattttgacgcaggcgtgccaaatagctttaattcaccttgctgtggtttaatgagcccaagcaggcattttaataaggttgttttaccagatccattcggtccaacaagtgctagaaagttcccttcctctactgttaaatgaatgtgatcaatgacatttcgctgtccatacgagtacgaaatatccttcatttcaataattggctttgccatgaatctttccacctttaatcaatataaaaagaatgattacgatttatacaacaaaaagaaaatggcttttgccattttctctgtccatacatatatttcattatataaaagaaagattaaaaagtaaaataaaagctaatgaatggctgttttgaacttaccgccttttgtttcatgcgtatccataatcgtaataaatgcttgaccatcaatttcaaatacaattgattttagctttgtaatttcaagtcttgtgacaacggcgtagatgacatccttttcttcatctgtataaccgcctttccctctcagctttgtcgttcccctgccaagtcgatgaagaatcgcatctgaaatttcatcataataatctgacacgataatgacagcttttgtttcatcaagcccttgaatgacagcatcaattgttttcattgccaaataatatgtcatgacagaatacatagcctgctctggtccgaagacaaagcctgcccaaataaaaatgaacacattgacgatcatgacaaactcaccgacggagaaaggaatttttttcgtcagaagaattcctaagatctctgttccatccattgagcctccattacggatgacaagtccaacaccaaaaccaagtaatagcccgccaaatacagtggctaagatcggctgatttgtaaatgcctctacatgatggagtgaagattcaatcacggctaagctgacaatcccaatcacagtggaaatgagaaacgttttcccaatatgtttgtatcctgatatcataaatggaatatttaaaatgacaacaatcgtcgcaaaattgatgaatgggttatctgtaaagagataatccaaaataagcgaaatgccgatgatgcctccatcaataatattgtttggcactaaaaataattcaatgctgactgctgcgcatgcagctcctactagaatcaggaaaattctcaaaataaaatgaggcactgattcctttctatgctgtttactatttgccatacgttctcccttctacacatgttaaattttcaataatcattttattcactttactattttagcatttcacagggtaaaataaaattttttgcacattttccgttttcgcccatacattattacagaggggaggaatggaattgattttaattcaaaaaattgtcctgcagcggcttaatcagatcacagcaaatgatctgttaaggtatgcgaaacagtatggtgtcagtttaacgtcaaaccaagctgccgaggtggccaaactcatgaatgggaaaaacgttaatatttttaatgatgcagagcgtaaccggcttcttaagcaagtggaagcgattacttctaaacagacagctcagactgtcaatgatctgtttaatcagtttacaagttaagcaaaaaagggccgcatttagcggcacctcatgatgttgtatgcttttttactgacccttaattttatctagtaagccttcgtcaaattgcttttctttcagcatctcaatttcgaatttgtaaggtggttttttgttctttttatcttcacctacataaggcgtttctaagattttgggcacatcttgaagttgcgggtgatgcacaatatagttcagtgcatcgaagccaatttcaccaaagccgatattttcatgtcggtcttttcttgcgccttgtacgtttttactgtcattaatatgaagaaccttgattcggtcaataccgacgattcgatcaaattcttctaacaccccatcaaagtcagttacaatcgggtaaccagcatcgtgtgtgtgacacgtatcaaagcagacagaaagtgcttcgttatgtgtcactccgtcgataatttgggcaagctcttcaaagcttcttccgcactctgatcctttgcctgccattgtttcaagtgcaatttgaaccttttgcccttttacgatgacttcgtttaaaccttcaatgattttttggattcctgcttctggtcctgctccgacatgtgcacctgggtggagaacaatctgccctgcacctagcgcttctgtacgttcaatctcagagcgaaggaagtccacgccaagctcaaatgtcgctggattgacggtgttcccaatattaataatatacggtgcatgtacgacgatatctgtcataccatgctctttcatatgcgcttgtccagcttcaatattgaggtcttcaatttttttgcggcgcgtattttgcggtgcacctgtataaatcataaacgtattcgaaccataagaggcagcttcttgactcgctgcaagaagcatatgttttccgctcatggatacatgtgaaccaatcttcaacaatgtttccccctactttccattacgctttgactttctacgttcctgtctcttgattttgtccatctcacgtgtcattttctttttatatccaggtttgacggctttcggttttctcacaagacgctttgctttttcttcaatttcattaggtgcttttttacgtctttgacgcttcaagcggtcatctgcatctcgccattcgccatgaacaatggttttgttttcaaacacaacgcccattttctcgatttgaatgagtgcatcctcatcagcaagctcataaatagtcatcgcaattccagatgaaccagctcgagctgttctaccaacacggtgaacataaaaatcaagatcagatggaagttcatagttgatcacgtggctgacgcctttaatatcaattccgcgggctgcaagatcagatgccacaatataagtgaactctaaatcatcaatttgtttcattacttttttacgttcgcgcggcgttaatccgccatgaagcactccaactttcattcctttttcttgtaggaatgatgcgatttcatcaacggttgtttttgtattggcaaaaatgatgcctaaataaggctgtacattcgtcaccatttcatgaagcaattttagcttgtcacgctgtttagatgggactaaaatatgctgaatgttttcagctgtaattcgttttggttcaacatgggcatattttggattgtccatatattttttcaggaacggctttagtttttctggaatagttgctgagaacacaagcatttgcagctgttctggcatttgtgaaccaatacggtccacatcttctagaaatcccatatccagcattaaatccgcttcatcaatgacaagagatgtcgctttgtaaacattcagcgcctgctcatgaatgaggtcagcaatacgtccaggtgtaccgacgaccaaatgcggctgggtttttagcttttgaatggatttctgcttgtccgttccgccaatgtaaagctttgctttcatctcttcttctggagaggcattctttaaaatcgtttgggcttctttgaaaatttgattggctaattctcttgtaggtgcagtaatcacaacttgtacttgctctttgcttggatcaattgaatgaataagcggcaataagtacgcgtgagtttttcctgttcctgtttgtgattgaccaatcacgctttctccttttaacacagcagggatgattcttttttgaatatcagttggctcataaaagcccagttcatgaatagcatctataataaaaggctttaattcatatgtcgtaaattttgtttcgttcatgttttcactccttaaggcaatgcctttttgctcatctcctcattatagctgattttcagcaaaaaaaccatgtccgcttttcttacaggaaaccaattgatgcttccttgcataacctatgaagagaaagagaatgcagtaagggaggtacaagtatgttagggcaaaagcctatgggcgattttcagccgcaccgtccctcacgccggcatcttggaaatggcggacaacccgggatttttcaaagagggcagcagcctcctatcgaacagccttttcaagggcaaggcaatcaatttcagcaaatgatacctcgctccccgtctgtacagggaggcggtatacgcggaatgggcggaatgccaggaggcgaaagccgtgcactaggcggcggcacaggaatgaaaggcatgctcgctaaatttcttcctggcgcagggggagcaggggtctctggaggtggtgcgggattacaaggaatccagagcttcacaaatcctgcgaccctctcaagcatgttaggaaatgtacaaaaagtgctcggtatggcgcagcaatttacgccaatgattcagcaatacggtcctttagtaagaaatctgcctgcgatgattaagctgtacagtcagctcggcagtgcggatgatgaaacaggcgaagatgaagaacctaaagagatcggcgaggaaacagaagtgccgcaagaagaagcagcacgagatgatgaaatagaagaaaacaaagaaccagaggacatcctggtcaaaaaagcagctcctcacacatcatctgctcctgaagcaaaaccgaaaaaaagacctggcagttctgttccaaaactatatgtctagtgatcttttaacggcgaagtgttcactgcgtataacaatctttgatatatgcgcttactttggctataatggaagctagagaatgataaaaagccgttttttacggctttttatattgttcttctctagaagcacttccctacaggaggacgaataaatgaatgtaattaaaatttcgccgcgtggctattgctatggcgttgtggatgcaatggtcattgctaaaaatgccgcacttgataaaaacttgccacgcccaatttatatattaggtatgattgtgcacaacaagcacgtgacagatgccttcgaagaagatgggatctacacactggacggaccaaaccgcatggacattttaaagcaggttgaaagcggaacagtcattttcaccgctcacggcgtttcacctgaggttcgtcaaattgcagaagaaaaaggccttatcaccattgatgcaacctgtcccgatgtaacgaaaacacatgaactcatttcagagaaaacagccgatggatatgacattatttatattgggaaaaagggtcatcctgagccagagggagctgtcggagtagctcctgacaaggtgcatcttgtcgaaacagaagccgacattgaggcgctcgatttaacatcagataaactgctcatcaccaatcagacgacgatgtctcagtgggatgttcacgatctaatggagctgattaaagagaaataccctcacgtcgagtaccatcaagaaatttgtcttgcgacacaggtacgtcaggaagctgtttccgagcaagctggccaagctgatcttaccattgttgtcggcgatccaaaaagtaataactccaaccgtctggcacaagtgtccatggagattgctggaacgcaggcttaccgtattggtgacctaagtgagctcaagctggagtggctgcaaggcgtaaataccgttgccgttactgctggtgcttcaacaccaacacctattacaaaggaagtcatacgtttcttagaaaactacgagccggatgatgaagcaacttggaagattgaacggtcggttcctctttcgaaaatactaccgcgcgtgaaaacaaagaaataaagaaaacgtcagagcatagcagctctgacgtttttttgtttacataaattgaaatgggtttgtgttcgattcagaaacaaagagctgtacatcatactttttatctgaacatagcgattgaagcttcgcctttacgccctctttcataatcttttctgcataatgccctgggtccactacgttcagcccgagcatcatggcatcatgggcgacatggaaataaagatcccctgtcacatacacatcagcacccattcttttcgcttgatgaatgtatttatttccgtctccgccaagcacagccacttttttcacaacagcgtcctgatcacctacaaagcgagcaccatttacatccagctttgtcttcacaaatcgtgtaaaatctccaagggtcataggctctcttagctcccctatacggccaaggcctttttgaataggaggaagatctgtcgtgtgtacactataagcgacttcttcataaggatgtgctttaatcatttcacgaatcacttgtttttctatacttgccgggaaaatggtttcaatccgcacttctttgacaaattccaattgaccgctctcaccaatgaacggatccgcatcttctgatggcaaaaagctgcctgtcccctcatttgaaaacgcgcaatggctgtagttgccaatatggcctgcgcctgcatttcctaaagctgtacggatggcttcttcaaattcctgcgggacatacagggcaagctgtttgatttgatcttcatatgtcgggactaacacacttgtttcttcaagctctaaagcctccgcaagcaagtcattgactcctccatcagccacatctaaattcgtatgtgccacatataccgcaatatcatgtttgatgcatttctcaatgatccgtccagctggctgatctgtcgctacatgttttaacggacggaagatcggtggatggtgagcaataatgagatccacatttctttcgatcgcctcatctaccacattctctaatacatccaaggtgatcatgacattgtttacctttttatttaacgtcccaatctggagaccgattttgtcaccttctacggcatatgcctttggtgaaaattgttcaaataattggatgatttcatgtccgtttactgttttagccaacagtcaaaacctcctttagaatctttatttttacatgcagctcttcaaggcgctccttattctcttctgcccgcgctgcctgctgaatttgactttctattttctccatatgctgaagctcttgcatccacttgcgccggaagacgtcgttttgctctttcgcaagaaacggaccaactagcatgcctgtttcaatcgacatcccttcataggctttatctttgtcgcctttttctgcgatcatgatttcgtatattttgccatcctcttctaaaatgacttcatccatcaattcatacccctcttgatagagccataaacgaatgtggtgagcatggatatttggctgaagaatgagcctctcatggcctgcgagcttatgcttaccatcatttaaaatgcttgcgatgagtgctccgcccatacctgcaatcgtgatagcattcacttcgcccttttcaataacttcaaggccattgccttttctgaccgagatctggtcatctaattcaagtctatgtacttgctgcttcgccgattgaagcggtccctcagtaatttcaccagcaatggcttttactgctttttgatgcaggatcgcatagcatggcaaataggcatgatctgagccgatatcagcaaagacggcctcatgcggtaaaaagtttgcgactctttttaatcgttttgataaattcatttcattcatacgtatcactacttttctttaatgttcatacttgtctatcttatataaattatggactttttaaaagtcgttttcaaatgaaaaaagctcttctgatgaaaaagagctttttgcgtaacattatttaattttggatacccattccgacatttcatcgagcttttcattcgggatcagcccgcctggcatcccgttgccgccttcttgaattttcttcttgatgtctgccacttcaagcttgtctccaacgccttttaatgcaggacctgcgccgccttcatagttttccccgtgacagctcagacagttttgcttatacaattcttccggcgtcgcattcgctgtctcttcttgtttttgctcctcgcctccagaggcgattttgtcttcatctttcaaccccttcattgataagaaaaaagtgagtccaatacctaaaatggcaatcaataagaatggtataagtggattccgtttcatttctttcatcctcccctttgtgaaaacccctttgagactatgcaaacaattctaattctactttaattttacaaaaagtaaacgaattatgatacaaaactttggtcaagttcacagattagacaaaaatgatgcaagatgagaaatgaagccttcagcacattttgatgtattttttatacatcttttctctaagaacgttgcaaattcatttgttattcagtaaaatataatcagattgaaaaaagcgttttcatttttgatgaagaaagaacggatctctttcaagatccgtccagtttctactctaagaagtcttttaatcgtttacttctgcttgggtgtcttaatttacgcagagctttcgcttcaatttggcggatacgctctcttgtgacgccgaacacctttccaacctcttctaacgtacgtgttcttccgtcatctagtccgaagcgtagtctcagtacattttcttcacggtccgttagcgtgtctaatacatcttcaagctgctcttttaacaattcgtatgcagcatggtcagatggagatgtcgcctcttggtcttcaataaaatcaccaagatgcgagtcatcttcttcaccaataggtgtttctaaagatacaggctcttgcgcaattttaagaatttctcttaccttttctggagttaaatccatgtcttcagcaatttcctctggcgttggttctctgcctaggtcttgcagaagctgtctttgaacacggatcaatttattaatggtttccaccatatgaaccgggatcctgattgttctggcctgatcggcaatcgcacgcgtgatcgcctgtctaatccaccaggttgcatatgttgagaatttgtatcctttgcggtaatcaaacttctcaactgccttcataagacccatgtttccttcttgaatcaagtcaaggaacagcataccacgaccgacgtagcgtttcgcgatgctgacaacgagacgaaggtttgcttccgctaatcttctttttgattcctcatcgccttcttcgatcttttgagcatacgtaatttcttctttagcagataacaaattgacgcgtccgatttcttttaaatacatacgaacaggatcattaattttgacacctggtggtacgcttaaatcattcaggtcaaattcctcttctgctttagccagctgctgaacatttgggtcttctgtctcttcgttttcactaatgagctctacaccctgttcgcctaagtattcatagtattcatccatttggtctgattcaatttcaaagctagacatacgctctgcaatttcttcgtatgttaaaacgccccgttttttacccgtttcagtgagcttatctctcacctgttcaaaggttaattcagtttcggtttcgtgggcttgtttatcagccattatggatccctccttccaaagcttgcaacgaattctaaagtaacttgcgatttgctttcgctctgcttttctctctttatcaaacagatgagcaaataggaataaaataaataatgatgaaggcaagatgcttgcggtcttatgctcctcccgtaaaggattcattgccagccgtaagtcttgtcataaatattagacgtattacttcagcgaacggttcaactgaataatttcttttgcaagtgttgccgctttgaagaaatctttttgcctctccgcttctgcacgttctagttctttttcctttatcattgacaaattccgatgattcaacactttttttacataatcacttaattcagcttcacttagttcgtctccaacttgaatcatgaatatatccgtcagaagctgattgataatatcatcttctatacggttcatcagatgctgcggcgttggttctttgccttcttcatacaaagcataaatgtacgtggccagcgccctgtgagaatctatattaaattcaatacctactctgtcaagtacttttcggatcacgtcatcactttttaacatatgagcaagcagcattcgctctgcattttcatatgctggccgcagacgctttcttcttacctgtgttgacagatgtgcacgccgtttttcaagcccgctttcttcctgtgtgcttttggcttcttgccgctgctgtttttcaaacagctccagttgttcttttaatgaatcaagtgagatcgagaactctccagcaagctgtttcatgtaaatctcttgttccaaggaaccgtttaaccggctaatttctcggagtacctgcttcatataagtaagccggtctccttcgtcagataaattctttcccctacggaaaaagttcatcttaaaagtcattaatgtcacacttgcatctatgatgtcattcctaaatttctcgccgccatatttacgaatgtaatcatctggatcaagtccatctggtatcatggcaacgcgaactttacatcctctttttccaagcaaatctgatgctttcatggtggcttcataaccggccgtgtcagagtcatagcaaagaatgatctcttctacgttacgtctgagaagttttacgtgctcttctgttagagacgtacccattgttgcaacactttcgccgacacctgatgtgacagctgaaatgacgtcagcaaatccttcgaaaagaaccgcccgttcgcgttttcgtatatgcatacgcgcgtcatgaaagtgataaagcagcttacttttatgaaaaagtggcgtttcaggactattcatatacttaggctgctgatcaccaagcgatcttccggaaaaagcgacgactgtcccatgatgatcatgaatgggaaacatcacacgatccctaaagcggtcaaaaaagcctgttccgttttcacgttgaatcaaaagaccagccttctccatcatcacaggatcaaaccctcgtttttctaaaaacttggtcacgaaatcccaagagtcaagagcatatccgatctcaaacttggcaattgtttcatccgtaaagcctctcgcccgtaaataatcgagtgcgttttgaccttcctttgtatttaccagcaaatggtggtaaaatttcttaagaagctcatgcgcttcaatcattttatgatctgcagtgtcctcttgctgtgaggagctgacctgagcatttgctacatgatcaggcaaatcaatatggtacttatcagcaacatgtgaaacggcttcaataaatgagtagccttccatttgtctgaggaacgaaaatacattacctcctgcaccacagccaaaacaatggaagatttgcttatctgctgaaacagagaatgaaggagtattttcaccatggaatggacaaagaccgaagtaatttcgaccttgctttctaagctgtacgtattctccaatcacttcgacaatgtctgcgtttttttggatttgctccaaaagttcatctggtatacgtttgctcatcctataacactccgtcgtacattattcgccttttaattcaaaaatccttcatgattcgacaggattttttgtagctgcgcaataaatcgctttttatcctcttctaaaagctttttgggaccttttccatatacaccttttcttcgctgtttactggaaacatgtctgcgttccaaatcaaaatcaattgtttcgtttgtgtacatccgtcctctttcagacagtacaatgacctgtcttggaagcagtaaggaggcaagaccaatgtcttgggtgacgacaatatcatgcgcggcagctgagttcgcaatgactaaatccgctgcttccttatgtgtatctacaaaccgccaatcttcaagtggagatcttttggtttgaaaatgctcatatgaagcaatgaacgtcacaggtacttgaaattgagatgcgacagaaaggatttcgtcttttacaggacaagcatctgcatcgacataaatcgtcctctcttgtttatgttcattcaggtgactaattctccatccctccaccttattcctgctttagagaagcaaaaagaccatactttccccccatatagcaaacaacagtaaaactcattttgtcgaaaagttatgttcagaatcacttgacttctgccaatattagtttattcgttcttgacttaacttaaacctaaaatcaatcattttatcacaattttttattataatacaaatgcagcaaatatgccattgtttttgtttacccgtttcccaccataggaaaaacccaggaggagcatcctgagtttattcggaacctcttttggtcagcatttgatgaatgacatttgccgtttcctcaactgctttattcgatacatcaacgacttgacagttaatgcggtccaccactttttcaaaatactctagttcttctttaatccgctcaatgttcgcataaattgcgcgatcatttaaacctagagatttcaaacgctctttacgaatatgatttagtttgtctggactgatttttagaccgatgcatttttttggatcaactgaaaataactcctctggcggatctacttcaggaacaattggaacgttcgctaccttcagccgtttatgcgccaagtattgagatagtggtgtcttagatgtgcgtgatacaccgatgagcacaatatcagcctttagaatgcctcttgggtctctgccgtcatcatacttcactgcgaactcaatggcttcaacctttttaaaatagtcctcatctaattgacgtacacgccccggctcatgtttcgcttcatttccataagcagtctccattttatcgatgagtggtccgatgatgtcataataaacgactccgtttgcttctgcctcttcaattaagaattggcgcatttctggcacaacaagagtaaagcagacgattccgttatctgctttcgccagtgaaatgacttctttaatcgtaccgacatcctctacatacggaattcttctaatatttgaatggtctgatgagccgccatcaaattggctaagtgccgctttgaccacgagctctgccgtttctcctactgaatctgataccacaaaaattacgcgattactcataacatcccctcgcagtcttctttaattagattatttcattctccgataagctaacaagtattttcgtcatgtttgttttcgtaattctgccgaccacttcaaagcctttatccgtatcttttataacaggaagtgcatctatctgcttttcaatcaagtgcttcgccacatccataatgaaatcttccttgcggcaaacggtgatgttcggcattcttgtcataataatatggacagggatagatggaagctcctgttttccaatacttgcgcgaaggaggtctttccttgacaacacgcctgttaaaatagagtgatcatccacaacgaataatgtgcccacatcctctaaaaacatcgtacaaatcgcatcataaactgaaacattctcatgtatcaccactggaatggattgaaaatcttttacttgaagttttttcagcttatctgctagaagctgcgtgcctgtttttcctgtgaaaaagtagccgacccttggtcttgcttctaaaaagcctgacatcgttaatatggctaaatccggtctgagggtcgccctagttaagttcagccgatcggcgatatgctctccagtgatcggaccattctctttgacaatctgtaaaatctgctcttgccgtttatttaactcgattgtactcaccacctttaaatagagagagcgaatctttactttatgtatatcattttcataactcatcatattatagcgcatctttgtccgaatgaaacaaaaatccactcaaaaaccgtgaattaaatgagtaaaaaacgattgcccttcgaaaaaggcaaccgttcttaggtatttattttacaattaaattgttcatattcgcaaatgattgaatgactttggctagtttgaccatttgcgccaaacgatttcgcttcagcttttcatcatccgcatgtaccattgtgtgatcgaaataatgaacaatcggtgtttttaacgtatctagcgcctcaagtgctgcgctgtattgccctgctgctacatgttccttgacagctgtctctacttgttgatacgcctcatatagcttttgctcatgctcattttcaaacagctcaggctgaatctctgcatcttccccttttttactgattgaaatgacgcgtcctaatgcttctgccgtttctttgaagctttcttgtttcacgctctcttcaaggacagctgcttttttcacgactgcataaggttcaatattttcaacatccagcactgcatcgacaacatcatgacggatatgctctgcttggaggacatattttaaacggtgtgtcaaaaattcaatcagagcagcttcatcttctgcttctacttgagcaagtgccaaaagctctttaaatgaaatattccaatgacgatcgagcaggatttgaacgataccgctcgcttgtcttctcagtccataagggtcttgagagcctgttggaatgacatcaattgagaagaaggaacaaatagaatccagcttatctgctactgccacaatcgcaccaatcaaagtggagggcgcctcatcaccggcaaagcgcggcatatagtgctcgttgatgctctttgccacttcttcatgttcgccaagtgcttttgcatatttctcgcccatgattccttgtaattctgggaattcatagaccatttgagtcacaagatcaaacttcgaaatacttgctgctcttgccactcgttttgtcgtttcgtcatctgcatcgacatgcgctgctaggcgggtcgcaatgtctgtcactctctttagcttgtcgccaattgtgccaagtttctcatggaatacaactttatcaagcttcttaatattgtcatcaatgactagtttttcgtcttctttatagaagaatgcagcatctgataaacgtgcacgaagtactttttcgttccctcttgcgacattttcaagcgcctcactgtttccatttctgaccgtaataaagtgcggcaataattccccttgctcatttttcacagggaagtagcgctgatgctctttcattgtggtcactaatacttcttccggcaatgcaaggaattcttcttcaaaggaaccagatagtaccgttgggtattctacaagatcgttgacttcttctagaagctcaggatcaacaggaatgacccagcctttttctgaagatagagcatttagctgctcagtaatggattgttttcttttatctgaatctgcaatgacaaattgatcgcgcaatgtttgctcataagaagcaggcgagtcgatggtggctcccctaccaaggaaacggtgtcctcttgtctcacggccgcttttcaccccggcaatttcaacaggtacaatctcctctccaaataaacaaacaatccatttaatcggacggatatagcgtaaatctttgcttccccatctcatgttctttggaaaacttaatgaggcagcaatctcacctaacgctggcagaaggtctttgacttgctttccttcttgaaacttttggacatgaacgtagtccactcctttgatctctttaaaatagagatcagctgttgaggcaccttgtccgcgggcaaagccttctgctgcttttgtccaattgccttcagcatcttgcgcaatctttttagccggaccttttgcttcttctttgatgtcttcttgtttttctgcgacacctttcacgagtacagcaagacgtcttggtgagttgaataaagcaacatcttcaaatgaaatattttgcgtttcaaaccatgcttttactttctcacctagctgctttgtgctttccggcatgaaacgagccggcatctcttctaagccaatttcgagtaatacatcttgtttattcatgagaagccgcctcctcttttagcatagggaatcccaatttttctcgttcttcataatatgttttggctacttttctggctaactggcgcactcttccgatatagccagttcgctcggtaacagaaatcgcgccttttgcatcgagcaggttaaacgtatgagagcatttgagcacataatcgtatgctgggtgaacaagccctttgtccatttggctatgcgcttccttctcataggtcgtaaataactcaaacagcatgtcagtattagatgtttcaaatgtataaacagagtgctcatattcagccattaagaataaatctctgaccgtaaatccgtctgtccattcaagatcgaagacattttctttgtcctggatgtaggaagcaagacgttcaataccgtatgtgatttcaacggaaacaggcttacattccaagccgccgacttgctggaaatacgtgaattgtgtaatttccatcccatcaagccatacttcccagccaagtcctgcacagcctagagatgggttttcccagttgtcttccacaaaacgaatatcatgtttcagcgggtcaataccaagtgctttcaatgattcaagatacagttcttgaatattgtcaggtgacggcttaatgatcacttgaaattgatgatgctgatacaatctatttgggttttctccatatctgccatcagccgggcgtcttgaaggctctacatatgctaccttccacggctctgggccaatgcttcgcaggaacgtgtatggactcatcgttccggcacctttttctgtgtcatacgcctgcattaatacgcagccttcatttgaccaatgcttttgcagcgtcaaaatcatgtcttgaatattcaatgatcgcacctccatcttttctacaccatccgctatgatatggcgggtggggatgagaaccccgcaaaagaacacaaaaactcccgtctctatgctcgcaaggctccttgcaaacatagggacgagagtttttcccgcggttccaccctatttgctggtgtcgtagcatccagccgctttgttttacgttgctcaagaatgcctttcgttacgcctccatccttagctcacaccgccctaaggtcgcttttaatgaattctgcgtaagtacttctttctgtcaatgcaacatattttatcttagatgatcttacaaaaagtcatgggagatgtcaacttttgttttccccgcccattagctttttcatggattccatctgattcatgaatttttttgatttcaaataaaggcctgaatactcttcatagtagtgatcgagcacttgacgaatttcttgtttcgtctgcggtttcacatcaacctgaccgagccttgataaatcaaaataatgaaataaacggagcagccttgcagctgctggggataagggcagtttatacggatctttagaaaagcaattttggcaaatgaagccgttatctctaatagagaaatgaaactgcccttctttttgaccacaatggacacattgatcaagttcaggcttcattcccattactgataacattttgacctctacgataaataagataatatcagcatctgtgccttcattcagatgacgcagagattgaagcaggagctcaaacaaataagggtttggctttttttcttctgtgcctttatcgagtaactctgtcatatatgcggcatatgcggtcaaaaataaatcctcccgaatggttcgcatactttcaatcatttcgccttgctggagcgttccaagtcctgttgatgattggatcagaaaggttccgtataaaaacggctggcttatggctgacaggcggctgtttgatttttttgcacctcttgccatcacgccaattttcccatgttctctagtgagcagcgtgacaattttgtttgtttcgccataatctgttgttctaaggacgattccttcacttttaatgagcatttgtctacactccgagcattggagggggtcaagaattataagattggaaaatcaaatcgtgctatctcttcttcaagtacatcgggtctttccaggttctccttttctaactctttgaaaagcagatacgtgtcaacgcttcctgtttgtgaaaatacgttccatgtaaaattcaacataaaaaccccacctttctttattagaagcagcaacgctacatccaacatattaattttatcttgaccaagctacctccatttcatgataaacaatttttactaatcgaaccgcaccattgtcagattttatgacaacagcagcgattttttaatattcgtcttctctaaatccgaagtcacgaaggtgagtggatttattacgccagtccttctgaacctttacccaaagctccagatacacttttgaaccgagaagtgcttcaatatctctgcgcgctttttgtcccacttcttttaataagctgcctcgtttaccaatgacgatccctttttgtgaatcacgttctacgacaatggtcgccgcaacatggatcttgccattttcatctggcttaatggattcgatcgcaactgcaatactgtgcgggatctcttctctcgttaaatgcagcactttttcacgaattaattcagaaataataaaccgctctggatgatctgttacttgatctgccggataaaattgagggccctcaggaagataaccttcaatctgctgaagaagcgtgtcaatgttgtttccttcaagagctgaaattggcacaatttccttaaatggataacgtgtgcggtattcatcaattaaaaggaacagctcatctgggtgaatttggtcgattttattgacgactaggaataccggtgtggatgtttgcttgagtcgttcaatgatgaattcatcacccttgccatagccttcctgtgcattgatcataaacaagatcaggtcgacttccttcagtgtatttgtagccactctcatcataaagtcaccaagcttatgcttaggtttatgaatccctggtgtatcgataaagatcgtttgtgacgtgtttgttgtcaagacaccttgcactttgtttcgtgtcgtttggggcttatcactcatgatggcgatcttttgtccaatcacacgattaagaaaggttgattttcctacatttggtcttccaataattgatacaaatcctgatttgaagctttcgttagtcatttaaatcctccggtgaaaatgcgcctggcaatagttcgtttactgttgtttcgtatatatgtccttttaagttcgttagaatcactggcatatcaggtgcacacagctctgaaatgacctgtctgcatgcgccacacggcgaaacaggccggtctgtatcagccactaccgctagcatttgaaacgatgtgatgccttctgaataggctttaaaaagtgctgttctttccgcacaattacacatgccatatgctgcattttcaatgttgcagccgccatacacttttccatcattcgacaataatgctgcaccgactttgaattttgaatagggtacatatgcaaaatctcttgctttaactgcttctgaaatcaactcttgtttgttcattcctagttcccactttcagaagaaatggacccactgtcacatttatattttacataattcacgtgacattttcacgcccatttctaaaaatgttaataaatagtaatattgttctattgcatgatcttcggtaagaagatgatcaccccaatcataaccgaaatcgcggcgtaaacgcaaacagcgcctgctgcagcgtccttcgctctctctgcaagagggtgcttctcttctgtcatcaggtccactgtatgttcaatggctgtattgacaagttcaagcgcaaacatccccccgcataaaagcaaaacgatcatccattcgaatggttcaatgtgaaaccaaaagccgcagatcaccacgatgatggctgcgactgtgtgaaatcgaaaattccgttcattcaagaaagttcgccatattcctctaaatgcataataaaaactccgaaaaaaacgggcaagcggccttcttttcttacgaagatcttgaaaggccataatcatccaagatctttgtctgtttggcgaacatttctttttcatcttcctctgtcatatgatcaaacccgagcaaatgaaggaacccatgaatggtgagaaatccaagctctctcataaaggaatgtccatattcctctgcctgctctttcgtacggtccacactaatgatgatgtcgccgagtacaggcggaatatcatcagcaccaatgatttcaatttccccttctccttcttcctcaagtgcaaaggagatgacatccgttggtgcgtctttcccgcggtattctttattgatttgatgaatctcttcattcgagacgatcgtcactgatacctccgcttgatctttgacctcaagggcatctgcagcgaactgaagaagcttttccacttcttcaagctgctcttttgatacttgtcctgtttcatctattaaatcgattaacaatgtcatttacttcaccttctgcttcggggcatctggatattcaatccgagaatgaaaaatcccctttaatgttgtacaaatcgtttgaccaataatatttaattctttaaatgtcagatcacattcactaaattgcccatcctgcattttatctgaaataatgcccttgacgagcttttcgattcgctctggatttggattatgcatcgatcgtactgccgcttcaacgctgtccgctacagaaataattgccgcttcttttgattgcggttttggaccaggataacggaattcttcctctgtcacctgatcatcacgctcttttgccttatagtaaaagaactttaacagtgacttcccgtgatgctgttctgcaatatcgacaagctcttcaggaaacttcttttctctcagcatatcagctccatctgtcgtatgggcaataatgatatttttacttagctgaggagaaagcttgtcatgcggattatcaatgttcatttggttttcgataaagtattgcggtcttttcgttttcccaatgtcatgataataagcgccaacccttgctaaaagaccgtttgcgccaactgcttcacatgcagcatccgctaaatttgccaccatgacactatgatgatatgtacctggtgtctctgttaaaatctttttgagcagcggatgatttgggtttgataattcaatcagcttcattgttgaaaggatgccgaacatactctcaaacacaggcattaacccaatgaccaaaatagatgatgcaaaccctgacacaaacgccatcatgaggttcacaccgatttcaagccctgatggtgaggagttttggatcagcgtaatggatagaaccacaaggacattcattaaagcgacccaaagccctgcctgcaatatttttgaacgtgcattatgctttctcaaaaataaaatgcccgccatcccgttcacaaggtaataagcacagatcacatagttaaagacgccggttactccttgattaaacatcatactgccgcaaagagcaaatacaaggccagagaagatcgctagccgctcattgataagcagcttgatcagcatcgtgccaagtgccactggtaccacataacctatcgtcgtatacttcgtttcctggaagagactgaatacttccatgatgactaaaataatggtgaaaataagcgagtagagcagcaacgacttattcttatgaacaagcgattttttcctcgtttcaagtgaatgaataatcgctgctaaaaacagaccaatcaatatcataagaccgcttacaggcttaatcaaattggagctgtttaagaggcctgtcagttctaatttacgatacacttcccggtcgataagttctccttcttcgactaaaatttgcccttgcttaatctgaacgggctgaatattatcagcggcttcttgtcttttcttctctgtagccactggatcaaatacatagtttggaatgatcgcaaattcaccaatttcttttgctgcatttaagtattttgatggaattgaattattttcaagctctgttttcacttgttttttctcatcttgtaatttcgctgctgtgatttctttactcatcagtgaatttaccactgtgatgatggaatccttagtaaaagagagattttcgtcacttgcctgaagcagtgctttgatggattggtctgaaacagcctcctgcatatctgatgtgagtttttctttgacacgcttgaccatttctttatctgatggcggattctctttttcatcagctgctttcttctcttctttaatggcttcaaaaagggaggagatgaggtcaacacgattgtcagaatacgcttttttgagagtatattgatcctctacttgatctgttgcttcttgcttcttttcttctgtcgcttcttgatcatcgacggttgatggagaatagatggtctgttcgctcactgaaaataaatctaagtcgagcgattcaggctttacatggaagaagagcaccacgaatagaatggctgctaaacctgcgtatagcaaaacatttaaataacgtgagcgctccattttctgaggttcttttttagacagtagtcttttgcgctgactgtctttctgattctttctcaaggaaagtacctccttttttactttaaaccacgatcgaaacaaaatgacccgatgaagacgatcgggtcactaagttcatttttgcttttcgtatgctccgatgatcttcgccacaagcgggtgtctgaccacatctgtctggtctaactcaataaatgaaatgcccttgatctctgcaagcatgtcctttgcagctgcaagaccagactgcatgcctttcggcagatcaatctgtgtaatatctcctgtaatgaccattttagagccaaacccaagtctcgtcaaaaacattttcatttgggcaggcgttgtattctgcgcttcatctaaaataacaaatgcatcatcgagtgtccgccctctcatgtaggcaagaggcgctatttcaatcacgccgcgctcgattaaacgttccgtatgatcactgccaagcacatcatgcaaggcatcatatagtggtcttaaataaggatctactttttcctttagatcacctggtaaaaagccaagactctctcctgcttcaacagctggtcttgtcaggataatccgtttcacatgtccatttttcagtgcatgtaccgcgttgacgactgccaaatacgtcttccctgttccagctggtccaattccaaagaccaggtcatcttttttcatcgccgcagcatattcccgctggccaatggtttttaccctgattgacttccctttagcatttttcgtaatttcatcttcatacatattttcaaaataattgagcttgtctttttgcgccattttaatggcatagacgacatcccgttcagaaatctcaattccttttcggatgagatgtaagagagatgtaatcagacggctcgctgtttctcttgatgcttcctgaccagaaacatacactttttctccgcgcgtaataatggagacattcagctcgttttccatcagtttcagataagcatcttgatttccaaataaagcaatcgcttcgtttgggctatctaatttttgttgaatttcaagtaaatgttctgtcattctctagtctccctgaacaataggtgttggttgaacaatatcttctattacttggtaaaggatgattaacttaactttaccattccctgttgtctcgtgcaaaactttttcacttttcacctctcctgtttgacctagcttctcttctaattcttttttacccattttaatccctgcttgaaccgcttctttatttgtgtatgtccgatttattttttcactttcgcgtgtcatttctttttcataggaaaatgggagctggaagtttaagaaatgtagtgggtgaacttctgtttctgtttttggctgcttaaaatcatcctttttaaaggaaatgccccaaaatggcattgaacctccaaatgcggagagcttgtgctttgtcttcattttacccgtaaagacatcaaaagatgttcgaagagggacagaaacttcagaacggtaccacgtttcaccataaattttcgctctagcacccaccgttttttgctggtcttcgctgccgatgaggccagagacgagcatctgccctttcttcacatgttcgtcaaccgcggcaagcggctcccctttttccacatacattctcgtgatgacagccttcttcttggcaacgatgtgctgaggactcgtatattgctcttcttccggctcatttttttccacaactttcatttgaaatgttgtaccgtttagttcaacgccgacccatgtaatgctttgaatattggcggtcagtgatttttgaattttctcaggtgttcccattagaaactgaaaacggcctttttgcactccaatctcgtctaaatgctttctcatctgatgttcagtttctggattggctcctttaatatcaattttccacaccatgtttgaaagcgccaatatcgtcgctagaaaacacacaatcccaagggtaaacccaatattcttccttgaccataggagaagaaacggaaatcccttcttttgatgaaatgaacatgtcacttcatgatgtctttgtacttttctgaaggcatgtacatctgataagcgaataaataagcgcacgctgtcttgacggcggctcacttgaaacattgtgatcccctgtctcgtgcactcattgatgagccgctcaatgccgtttcccttgatctccacttccactctgccaataaaataggcgaaccatttattcttcacacttctcccctccgtcagttaagaatcaatataacggacctcatcgattttcccttctaataagatctcttctggcaaaatcgttttaatcacaaaatctttccctgaaataatgcattgtccttgtttgagcatcagccttacctcttgatcactgaaaagcaaaagccctttatggttctctatgtaaatgtggagtctgccaaccatcgtaatacggggaagatccatcatgacgtctggagggatttcaagtgttcttgtcagccatgctttaagtcgattttttctttttcccattcaataagaaccccttcccgccccatgtgtatgagatcaaactgaaagatggtgagactgatgagaaagcctctatatcatcctattcctcagcggttcagatcatgctaatgaatcccgcaaaacagccgtttcatcatttttactgcgagaaatctccatcaggaaaaacaaaaaagcccctttatataaagggactttcttctttatcttttatatggccgtttcatcgttctgtgcggctttttcgcgcgcggctctccaaatacttctccaagaagcatgccttgaacaacagtattttggttaagcctgttaatgacgtgcggcttcatttccgcagcagaagctttcggtctggtcagctgcctttcaagagatttgaactctttattcagctcgctttttctttcttccatttcagctagtgtagcggtataacgatcctgtaaggactgtgaaccttgtttcttcatcccgccatgatcatgtacatcgccgaaatcgtccaactggtctgttttgactgggttcgggctggtttgttctgctttcttttgaggcataggcttattctgaggagccggcttatgttgctggttgttttgttccttctcctcttgtttgccgattttcccaaatacagcagagatgataccgatgataatcgcaattagtaacggattttcaaatagaatgtccattgggctccctccttaaagcgtgagaggatgcttatttgttttcattatcagatggaccttttgtcattttaccaaatgaatctctcatatccgtatcagcatcgatattcttaatgttcatgtagtccatgactccaatattaccttcgcgtaatgcttcagccattgcaagtggtacttcagcctctgcttctacgactttcgcgcgcatttcttcaactcttgcacgcatttcttgttcttgggcaacagccattgcgcggcgttcttccgctttcgcttgtgcgatgtttttgtctgcttctgcttggtccgtttgcagaatcgccccgatgttcttaccgatatccacatctgcgatatcaatcgagagaatttcaaacgcagtacctgaatctaatcctttaccaagaaccgtttgagaaatcatatctggattttctaaaacctttttatgattatttgatgaaccgattgtagagacaattccttcacctacacgagcaatgattgtttcttcccctgcaccaccgacaagtcgttcgatgtttgcgcgaactgtaatacgtgctttggcttttacttcaatcccgtccattgccacaccagagataaatggtgtttcaatgactttaggatttacactcatttgtacagcttcaagtacgtcacggcctgctaggtcgatcgctgcacaacgtgcaaagttcaattcgatattcgcacgttgagccgcgattaatgcgttcacaacacggtcaacgttaccacctgccaggtagtgactttctaattggttaatcgtcacatcaagacctgctttatgtgctttgatgagcggattgaccactcggtttggaatgactcgacgaagtctcattcctacaagtgtaaaaatgctcactcttacgccagccgctaaggcagaaatccacagcatcaccggtacaaaggtgaagaagatcgatagaacgatcagacctgctgcgataatcacaaataatagtaaagtagatggatccattttattcctcctataaattcagtatatctatactttcctcacgacaatgcgtgagccttccgctttgacgattttaacctgttcatccttgtcaataaacgcaccttctgacacaacgtcaatgcgctcatctccgagtacagccgtcccagatgggcgaagcgctgttaatgtaacagcgatctgtccaacaagatcctctcttgtttcatttgagacataaccgctttctttattggttgaatcggttaaaatgaactttttaaaaaatttcatacgtttccccaacacctttgtcaataaaataactgctatgattgaaacagcagtggcaatcaagatggaaatcgccatttctgtaaagcttccagctgctaaaaataagctggcaacaacacagatcagtccaatgacacctacgattccccccggcaaaaacaattccagaataatgagcaatatccctgctaagaacaggaacaacgtctcatatcctgcaaaaccagccacgagatgtccataaaagaataaaagaagcgctgtcactcccatggtgcctggaaccccaaagccaggagaatagagctcaacaattaaccctaagcttgcgatggataaaaggattggaatgacgattgggtgcgtgagaaagcgcgcaaccttttcagcaaagctcacttcatcgtattgaacagaagcgtctgctaatttcagcttctgaagcaagtcatctaaattcttcacttcaccttctgcgtaaccaaattgaagcgctcgatccgtattaaaggtgagcagttctccttttggtgcaccagcatccttcgcatctatgtctggatcagccatcgcaagcgcatatttcggatcacgcccctgcttttcggcagcatcactcatttcagcaagccatagcgattcagatttttgatcggcagcattgccttccccatcaatgatcgcagcagctcccatctttccatttggggtcatataaatctcgtcggcatttagtgcaaggaatgccccggctgaaagcgctctatgattcacaaatgctgtcacagggatatcagacgcacgaatggtatctgcaatctcaagcgccgcatcgactgcaccacctggtgtattgatgtctagaatgatatgtttcgctcgttcggactttgcctgctcaaatgatcgttcaataaatttagaaagtcctttttctactgtatcttcaattgggataacatgaactttctgatctactgatttcgcggtcaattgaacccctaataacaagcatattataaaacaactgaagagagcaatagaaatttttatttttttcatctatttggtgatccctcctctctatcttccattttaccgttcctttacatacgttacaaatgtatcataggtttcatttttatatgacagaatgatgaaggtataaaaaaagtacccttctaacaatagaaggatacttttttattgagacagctgctcgctgacaagtctgttaatgacagcaccatcagctttaccttttacttttggcataatagcgctcatgactttacccatatcagccttcgatgaagcacctgtttcagcgatcgtttctttcacgatcgtttgcagttcttcttcagaaaactgttcaggtaaataaacgtctaagatgtcaatctctttttgaactttatctactaaatctaagcgattagctttcgaaaattcatggagggagtctttacgttgcttaatctcgcgggaaaggacggttagttcctcatcgccggtcaaactgtctttcttaagcttaattgcttcattttggagcgaagcctttaccatacgaatgacaacaagcttgtctttctcacggtttttcataaaaagcttcatatcagtatttaattgctcaagaagactcataaaatccaccctctttagaatttacgttttctagcagcttcagactttttcttgcgctttacgctaggcttttcataaaattcacgctttcttgcttcttgcaatgttccagttttggatacactgcgtttaaagcgacgaagagcatcttcaagcgattcgttttttctaacgaccgtttttgacattctctttccctccctccgaatacaccaatcgactgcattaaaaaaagatatacatgcaaaacatgtacctagacattataatataagcctagtgtgaggtcaactaagtgatttggaaatatattttcgtcatgagcaggtagacaagtccatatattcattggtaagaggaggacttttctatgatggcgatcatttatttttgtgcacttattttcatttttttatggtcaatgggtttgctgagaaaaggattaatggcgcttgcgtcgtctcgtattgagaaatcacttcttctctttacagatcacccaataaaagcattcttggtcagcatcgtatttacagggattcttcaaagcagttcagcgtttatggtcatcgtgatcggctttgtcagtacaggcattctctcttttaaaaaatccattccaatgattcttggcaccaatattggctccacgtttacaacagaatttatcgccattaaaatggatgttttcatgtgggtcttaatcctagctggtctgatatgcatcatgttaggcaggaaatcttttaggcatgcaggaaaaagtatatttgggctcgggatgatctttttttgtattcaaggcttttctaaaattgcaggtatgatgacaagtcaacctgagacattgcgctttcttgaaatgatgcagcattctgactggacggcgctgctttcgggtaccattttcacagcgattgttcattcgagctccgtctgtatcggcattttaatggggtttatgaatgaaggaactgttgggcttcaggaaggcataagctttgtgttagggtcaaatatcgggacatgtattacagccgtaatggctgccatatctggcggctatgcagcacgtcaaacggcttatgcacacgttttgtttaatgtgctcggcgtgcttttatgtctcccatttctcgccatgatgacggaattcgtcgcccttcttgcaaacgctccagcccagcaaattgcgcacttcagcctgctgtttaatgtggcaagctctttgcttttcttcccgttcattcatccatttcacacattgatcttatgtcttttaccaaatcagtcaaaataaaaaaaccagcttgcccttttggcagccggtttttttatctattatgaggtcattctcactttgtctgtttgcacatcatcactgatacgaacgaattgtccttcgttataaggataacccgctttcatgattttcactttgaccaaacggccgatcatgtcctctgttccttcaaaaacaaccttcatatagttatctgtatatcccacataaagattgtgctttccttcttgttctttgaaggattcttccggaataatctctaggacatctccttcataagctgatgcatattctttcgcaagctggtcagaaagagcaatcaagcggtggacgcgttcgtttttcacattttcatccacttgatcttccattcttgcagctggcgtacctgtacgtttgctgtaagggaatacgtgtagttcagagaattgatggtctttgacaaaattgtacgtttccaaaaactcttcctctgtttccccagggaatccaacaatcacatcagaggtgacagcaaggcctggcaatgcttttttcagctttgttaaacgctctgcaaagaattccatcgtatatttacggcgcattcttttcaggactgtattcgagccagattgaagcgggatgtgcaagtgtctgacaatcttatctgactgatcaagcacttcaatcacttcatctgtaatttggcttgcttcgatagatgaaatacggattcgttttaaaccgatgacacgttcatctaattctttcagaagctttgcaaagttataatcctttaagtcttctccgtatccgcctgtgtgaatacctgttaatacaatttctttatagccggcatccacaagctgctgcgcttggttgatgacctcttctggattacgagaacgaagaagtccgcgagcccaaggaataatgcagaatgtacagaaattgttacagccttcttggatttttaatgaagcgcgtgttctgtctgtaaatgcaggaacatcgagttcttcaaacacacgtgctttcatgatattgccaaccccattaatcggctgtctttctctgcgatattcttcaatgtaaccgagtaatttatgtctgtcttgtgttccaacgacaatatcaacaccaggaatcgccataatttctgctggagatgtttgcgcataacagcctgttacacaaatgacaccatccgggttatgacgaatggctcttctaataacttggcggcttttcttatcgcctgtattcgtgaccgtacatgtattaatgacatatacgtctgcttttgattcatactcttttctttcatagcctgcttctttaaacagctgccagatcgcttctgtttcatagtgattgaccttacagccaagtgtatggaacgctactgttcccatcatgattcacctcttaataactctgtttgataagatatagcagaaagcgcgtaaagaggagctgtttccgttcttaaaatgcgtggtccgagcccgcaaatgactgcaccaagcgtttcaagctcgtcaatctccttttctgccaaaccgccttcagggccaaaaaccacgagcaaggtttgtccgcctttcatctgttggagcacagtttgaaagcggctttgctctccttctttcgatgattcttcgtatgcaacgacacatttatcgaattcaccagctaattgagtcagctctttaaacgttgatactggatcaacacgaggaatgatattccggtaggactgctcagctgcttctttcgcgattttctcccagcgttctcgttttttatgtgacttcttttggtcaagctttgtaatggaacgagccgcttgaaacgggataaatgcacttgcgccaagctctgtgcctttttggataatcagctcaagcttatctccttttgggagaccgctcgcaattgttacttttaccggaagctctctgtcctgatttgtccagccttcaacgtgacaaatgacttcttcctttgttattgtatcaattttactgagcgcttcaaagccgtctgtcgttaagcaaaggatttcctgccctgctttcatgcgcatgacgttggaaaggtgatgtacatcttcaccttttatgacgatagatccctttgcgatcacttcttctttcgtgaggtcgataaaatatcgttgcatacgtgtcctgacacctactcgctttattttttcgctataatgctgacccaatcttccattgacagcacttcaacaatgtcaaaacctgcttcttctagtgctgttttgacttgtaatttcttttgtccaatgatgcctgatgtaatgaaatagccatctttcttcaataagtcataggcttgatctgtaaagcgcaaaatcacttctgcgagaatgttggcgacgatcacatcacgttcacctgaaatcccatcaagtaagttgttttgcttgaccgtcacttgttcgcttacaccatttagttcgatgttttgcttcgcactttcaaccgcaacggtgtcgagatcaaaggcttgaatgtcctttgcaccaaccatcgctgctgccacacttaaaatcccggagcctgttccaacatcaatcaccgtatcgttttccttcacatagcgctcaagcgcctgaatacaaagaacggttgttggatgtgtccctgttccaaatgccattcctgggtccatttcaataatcagttcatcagaatgaaccggagtatattcttcccatgttggaacgatggtgaatttttcagagattttcacaggatgatagtatttcttccatgcggtggcccattcctcttcatttacttcacaaatagacagcgtgtttcgtccaaggtcaatatcgtatagaagaagattgttgatggcttctttgatctcatctaccgtttccatcaaaaagctgttcattggaagataggctttgacgatgaccccttcatcaggatagtcattcggatcgagctggtagatctcaccgtatacattttcacgttccttgactaaatcaagcgggtcctcaatcacgacaccacttgcacctgcttcatgcaaaatattggtgatcggttccaccgcttcatttgttgtatggacgctaatttctgaccacttcaatactaccaactccttatccgtcttactcgcctttaaatgcgcgtttcaccttatcgaagaagctcatttcttgttcgtccggtttatttccgctcacttcagcaaattttctaatgatatctttttgattatccgttaaatttgtcggtgtgacgactcgtacaacgatatgctgatcgccttggccatagccgcgtacatttttcacaccttttcctttgagtctaaacttcgtgccagtttgcgtgccagcagggactttcaattttactttaccgtgtaatgtcggcacttcaatttcgtcacctaatgcagcctgtgcaaaggttagcggcatttcgcagtaaatgtcatctccgtcacgttcgaagaattcatgcgaacgcacatggaacacaacaaatagatcgcctggaggccctccatttacacctggttccccttgaccagacactctgagctgctgaccatcgtcaacacctgctggaatcgtcacattgattttcttacgcttacgcactttaccagagccgccacatgtagaacatttgtgatcgatttgttttcctgttccgctacagtagttacatactctgcggttgaccactttaccaaacggagttgactgctcaacatttaattgaccagagccgccgcaatgtgaacaagtctttgcttctgtcccaggctttgcccctgatccatgacatgtttcacatgattcctcgcgagggatttcaatcgttgcttctttcccaaatgctgcttcttcaaatgaaagcgtcattgtatattgcaagtctgctccttgacgcggtgcatttggatctcttcttctggctccgccgccaaaaatactagagaaaatgtcatcaaagccgccgaagccgccaaagtctcctcctccgccaaaaccgccgccgccaaagccttggtttggatcggtatgaccgaactggtcatattgcgaacgtttttgatcgtcagaaagggtttcataggcttcttttacttctttgaatttctcatctgagccagcttctttattaatatcagggtgatacttttttgaaagcttgcggtatgcctttttgatctcgtcttttgaggcgctcttactcacgccaagcacttcatagtaatcacgcttactcatctcttcacactcccgatttctcacataaatacgattgtatcattttgatttgacctttttcaattgctttcatcattggaaagaaaaaaagtcaaagccaagagatcctgactttgactttctgacgagtacgtttcagcagtctttttcaaaagtaaaggtgattattttttctcttgatcgtcgtttacttcttcgtattctgcatccactacattgtcatctgctttttgagcaccttcagcgccgccttcttgctgagcttgtgcttgttttgcagcttcttcatagagctttgtcgttagttcttgaacgattgtttgcagctcatcttttttcgctttgatgtcttcaagctcgcctttttcgatcgcagcttttagtgcatctttcgcgtcgtttgcttttttcacttgctcttcatcgattttgccttctagatcttttaatgttttttcagttgtaaacactaattgatctgcttcattgcgcacttcgatttcttcttttttcttcgcatctgcttcagcattttcttctgcttcttttaccattttttcgatctcatcatcagaaagacctgaagaagatttgattgtgatgttttgctctttgcctgtacccatatctttcgcacgtacgttgacaataccgtttttatcgatatcaaaagatacttcgatttgtggtacgccgcgtggtgctggcgggatgtcagtcaattggaaacggcctaatgttttgttatctgctgccattgggcgctcaccttgcaggacatggatgtctaccgctgtttggttgtcagcagccgttgagaatacttgagatttacttgttggaatggttgtattacgttcaatcagcttcgtgaatacgccgcccattgtttcaattcctaaagaaagtggtgttacgtcaagaagaacaacgtctttgacatctcctgtgatgactccaccttggatcgccgcaccaagagcaaccacttcatcagggtttacacctttatgaggctctttgcctgtttcttttttgattgcttcttgtactgcaggaatacgagttgatccaccaacaaggatgactttatcaatctcgctagcagataaaccagcatctttcaaagattgacgtacaggtgtcattgtgcgctctacaagatctgcagaaagctcttcgaatttagcacgcgtcagcgttaattcaaggtgaagaggacctgcttctccagctgtgataaatggcaatgagatttgtgtagaagatacacctgaaagatcttttttcgctttttcagcagcatcttttaaacgctgaagcgccattttatctttagaaaggtcaataccattttcttttttgaattcagctactaggtgatcaatgatgacttggtcaaaatcgtctccaccaagacggttgtcaccagcagttgagcgtacttcaaagaccccgtctccaagctcaaggattgatacgtcaaatgtaccgccgccaaggtcgtatacaagaatcgtttgatcttcttctgttttatctaaaccatacgcaagtgcagctgctgttggttcgttgatgatacgttctacttcaagaccagcaattttaccagcatcttttgtcgcttggcgttctgcatcgttgaagtaagcaggaactgtgattacagcttttgttacttcttcgccaagatagccttcagcataagatttaaggtgttgaagaatgattgcagagatttcctgcggtgtatagttcttgccttcaacttctactttataatctgtacccatatgtcttttaacagacatgatcgtgttcgggtttgtaattgattgacgtttcgctacttcaccaacttggcgctctccgtttttaaaagcgacaacagatggtgttgtacgtgctccttcagcgtttgcaataacttttggctctccgccttcaagtactgcaacacatgagtttgttgttcctaagtcaatcccaatgattttactcataatcgatgacctcccattatgtagttattgatttacttttaccattgatggacgaataactcggtctttgagtttatagcccttttgcaattcttctactacgatatttgaatcgacattttcatcttcaacttgcatgacggcttgatgaaggtttggatcgaactctttgccgacagcttcaatcggttcaacgccttcatttttcaacgcttctaccagctggcggtaaaccatttgcattccttctaacaaacttttcgtctgctcattgtctggatcaattccaagcgctctttcaaagttgtcaagagctgggagaagatcgctgacaacatgttgagaacgatatttttgcacggtctccacttcagttcgagcacggcgtttatagttttcaaaatctgcttgaacacgcagaattttgttttctttttcatctagaagctgctgcaattcatcgattttctcttggaaggcagactgttcatcatgtgttacttcctcagtatctgcttgaactgcttcttcttgtgcttcaacctctgcttcttgctcaggtgtctgtttttcttctgacattgtgttcacctccctcaaaagattcaagaatacgaaggggcaatgcccctatcttttatcaccctactcatcatacaaattggaaagtgcgtttgacaagtcttttgatacatgatgcaaaagactaacgactcgcccgtaatccatgcgggttggaccgatgatggcaatggagccaagtgatttttgatcaatcgaataagtggctgtgatcaaactgcagttctccattgcttccaaattgttttctgaaccgattttaatggtgattccttgctgatttggatgaaacagctgcatgacatcattcttttgctcaatcagcatcatgagtgagcgaatgcggtcgatgtcatgaaactctggctgattcaacatattaatcttcccgccaaagaaaagttttgattcattttgtgtcgatgtaaatgtgttgcccagcgtatctaaaatgtgatcataatcttttaaatgtgtgcgcagaagcatgaccacttctttatacatcctgtccttcagctggtccattggaacgccagctaatctgctgttcaaaatattcatcagcttctcaatatcggagacatcgagatgctcagagaaggtaatggttttgttttcaacatgcccgctgtctgtaatcatgatcgctactgctttgtttggctgaacggggacaagctgaatttgctttaatcgattttcacttagctttggaccaagcacaatcgatgtatagtttgtgagatctgataaaatttccgccgatttttgaactgttttttccagctcaaaaattttctcctgaaaagccgactggatgagcacaagctctttagacgacagttttcgcggagagagcaaatgatctacataataacgatatcctttttctgaaggaattcttccagatgaagaatgggtcttttcaataaaaccaagttcctccaaatcagccatttcgtttctaatcgtcgcagagctgaatgtgatgtcctcttttttagaaagagtttttgacccaactggctgcgccgaacgaataaagtcattaatgatgacttgcagaatcaaaagctgacgatttgttaacatcatcatcacccctgttagcactctctttcaacgagtgctaattgtataaacaaaattaccaaactcaaattaaaatgtcaattataactcaccgagaaacgcttgaaatacttcatttcctaacaatttcccttttcttgttaaacgaatgccgatgtcatcttttacaatgagacctttttcttctaattcttcaagaacagtggaaaaaagagcttctggtgcaacaccatatttggcttggaagtcggcacttttcaccccttcgatctttcgaaggcctaagaacatttcttcttctatctgctctgcttttgtgacctgatgagtttccttatacgggaacccagtttgctcaatcagttccaagtaatgcttcacaggccctgcgttcacatttcggatgccatctacatacccgtgtgctcctgcaccgaaaccgaagtagtcttcattgctccaataggtcaggttatgctggctttcaaagccaggttttgcgtaattgctaatttcgtattgctttaatccatgtcgctccatttcatccatcacaagctcatacatttcagcctcacgttcttgcggcggtaaatgcagtttgcctttttgcattaagttgtaaaaaactgttttcggctccacaatcagtgagtagacagaataatgctctgcccctaatgagaaagctgtctcaagtgaattcatcacatgatgcttttcttgatgcggcaatccaaacatgaggtcgaggctaatgttgtcaaacccaaccgctcttgctcgctggaaagacgtgaggacatctttcttttgatgaactcgtccgatttttttgagtaaatcgtcttcaaaggtttgcaccccaaagcttagccgattgacgccggctgcttttaatacatgcagcttctcgagtgataattcatctgggttcgcttccactgcaaattcaaccagatgctttgccggttttaacacacggtgaatgctgttcatgagctggtctagctggctgacggtcagtgatgtcggcgttcccccgccaataaagatcgtctttagttcttgctcgcccttttgctcgatcgtgtgctgcatctctttttcaagagccgctaagtattcatcgactggctgcgttttaatgaaaaatttattaaaatcacaatagtggcaaatgtgctcacaaaatggaatatgaatgtatgctgctttcatttgatgacaccttctttacaggtaaagagccgcagtttatcgctgcggcacctttgtttgttttcgactataaacgccaaggctgacattgtaaagcaggttgccttgagggtgttatttttttggtgtgctgtcgtccatcttcagcacagccataaatgcctcttgcgggacttcaacagagcccacttgtttcatgcgctttttcccttctttttgcttctcaagaagcttccttttccgggaaatgtctccaccataacatttagcaagtacgtttttacgcatcgctttaatggtagaacgagccacgattttttgtccaatcgctgcttgaactggtacttcaaaatgctggcgtggaatgagttctttcagcttttctacgatgattttgcctcgttcatatgcgtaatcgcggtgaacaataaaggaaagggcatcgattttttcgccattcagcatgatatccattttcactagagtagatgggcggtagccaatcagctcataatcaaaggacgcatagccttttgtgttggacttgagctgatcaaagaattcgtacacgatctccgccaaaggaatttcgtacacaatgctcactcggtttgcatcaaggtattgcatatcaatgaaattgccgcgctttccttggcaaagctccatgacagagcctacataatcattcggcaccatcattgttgctttcacgtatggttcttcaattttctcaatcttttgcggatcaggcagattcgacgggttatctacgacgattttttctccgtctgtcatatacacatcgtaaataacacttggtgctgtcgtaataagatcgattttgaattcacgttcaatccgttcttggatgatttccatatgaagcattccaagaaagccgcagcggaaaccgaagccaagtgcttgggacgtctctgcctcatattgaagggaagaatcatttaattcaagcttttctaaggcttcacgtaagtcattatatttcgctgtgtcaattggataaagtccgcagtacaccattgggttcagctttctgtatcctggcagcgcttctttcgctgggttctccgcacttgtgatcgtatcccccacacgtgtatcaccgacatttttaatcgctgctgttaagtagccaacatctccaacagtgagttcatctgtcggcatcgcttttggtgtgaatacgccgacttcaagcacttcaaattctttacccgtcgccatcattttgattttctgacctggtctgacggttccttcaacaattcgtatgtacgcaataacgccgcgatacgcatcgtagagagaatcaaaaataagagcttgaagcggtgcttctgggtctccagcaggtgccgggaccttttcgacgatttgttctaagatatcttcgatcccaatacccgccttagcagaggtgagaacagcttcagacgcatccaacccgatgacatcttcaatttcttctcttacacgctcaggctctgcacttggcagatcgattttattgataatcggaagaatttctaagttgttatcaagagctaaataaacgttcgcaagtgtctgtgcttcaattccttgtgctgcatctactacaagaattgcaccttcacaggcagctaggcttcgagatacctcataggtgaagtcgacatgccctggtgtatcaatcaggtgcataatatattcttctccatccttcgccttatatttcagctggacagagtttaatttaatcgttatgccgcgttcacgctctaagtccatggaatcaagtaattgttctttcatttctcgctgagtaatcgccgctgttttttccaaaatacggtccgccaatgtggatttcccatggtcaatatgggcgataatggagaaatttcgaattcttgattgccgttctaatcgtttttctttatctgtcacaatctatcactcctactataaaacgcgggttgcgctagcttagattatatcaatagggctgtaaagattcaatcgaaatcaagaaaagccgctcatcggtcagcggctttagtcatatggtattgatttgtttatttcccattcatccaatcataaagagaacgggctgcatgtgtcatgccatcagacagcgcttttcctgccttggagaaggcattaaagctctctatttcctcaagctgcttttgtttttcggcaagatccttttctgtaacagccgttcctaagatagaggcttctcgttctttatcttcgttcatttggatggagaacgcgccttttaattgcgggtcatggtaacccttcatttgcagcatgccattattcgcctgctgcattcctaaaaagacgccaaatagcaagactagtcctaaaataatggtttttccaataaatgatcccatgcaccgtcaccaccttaagagcgttttttctcatcctttgctttgccgtttaccttttccgcgtcccagaaaatgtcgctgaagacatcagctgctgcattggatgcatttttcaattcttccatattattatccactccgccaaattctaaaagaagggctttgtcggataaatcttgattataaattccattatcgccaatttctcctttggcaaacacaccgacactaagacctttatattttttctccatcaaatggtggaactccgtcgcaagcttgaggtttttctcatagctttgattcttcttccctacaacaaacgcaattctcgcatattttttccctttgatctcgacagtggtgtctttctttcttcttgagtcacggtggatatcaattaaatattcgaggtcatcatttttcgctaaggcttcttttacgaccaatcttgattcattataagactggggatactttaatcctttttgtagaagccttttttcaacttccgttttgtcgaccgtattcccgatgccttgctgatcaagcgcctttccgaacatgtcgccgacaagggtgacattcacttttgagtgccgtgcattgtttggattcgtttctccttttaaaaatggtaaatatgattccgtattatgcgtgtggtaaatgtacacggcttttcgttttcctgtcgaccggtccggctctttcgcaggctttttcggcacatctttgtcgagcttgtccagctctgccaaatttgcttctttttcatcttggatgacttcacttggcggcggcgattccattggcatgttggtatagtctgttccttcacccgctaagatgatttttgtatcaaaatgttcaaaacctgggagttctctccctagaaaactacgcgggtcttctaaattgatactagtcgcaagcttgagtgacagtccagagaaatgaaaccctttttgatctttcgggactgctgaggcgaaatattgattttccatacccattaatgtagcgaagaaggctccggaaagctcatctgctacaccatatagtgaggcttgcggcctcagctctggctttaaagatgtcaacgcccctgacatcacaaacaccacaacaagcgaggctataaataagaaaatgcttttcactacttttgttccattaatcgcaacgaccaactgtcgaggacggcggggtctttttttcatgatttactccctccagcacgctttctagtaattacactatgagcgagctagagaaagtagaaccgattaatgattataagaacccatgttatcttgagagattttttgatggagtgctgtatttaatccattggcgagtacgtttgccatatcatcaatgaatgtatccacttccttaggcgtgaccattaaattttgccctagcggcgcaagtacttcatggatcagctgccgtttctcttcttccggaagagtccctacgatacctaaaaatgattgacgcgtttcctcatctggtaagtcttcttcgtttagcacttttttcttcccaaaagtcaaaccagccggcacaagagagcgggacggccggtcatctttcagttctctaccaaaatgctttaagacataatcaattgtgtcacttgcaatggttactgcatctaccactgttggaacgccaatcgcaatcactggaattcccaacgtttctttgcttaattctttccgcttattccctacacctgaaccgggatggatgcctgtatcagagatttgaatcgtggtattcacccgttccactgcacgagcagcaagagcatcgattgcaatgacaaaatcaggtttggaccgctcgattacaccttgtataatgtcgcttgtttcaataccggtcagtcccatcactcccggtgataaagaggacactgggcgatacccttcctgtacattttccggctgcaattcaaagagatgccgggtcacaagcaggctttcaaccgtgagcgggcctagcgcatctggcgtgacattccagtttcctagtcctactacaagacagctcgcatcagcctgaatgcctcggtcttttaaaaactgagcaaaatgacgcgcaaatacttcgacgactttttcctgcatctcagaatctttctcccgaatgccctgcgcctcaagcgtcaagtatgttcctgcctttttgctggtcagctcctccccttctttcgtgatctccactgtgcgtatacggatgccgtgctcctctttttccttttcgacaatcccttgaattccgtcctttttgacgacattcggatcgttctcttgttctagtatctcttttgtttcaacagccaagtctgtccggatttgataagcacttaaatcaagtttctgtttctccataaaaagactccttccaccaagtaattaacagtagtctttccatctctttaaagaaacattcgagcgcttcatcaatgaaaaatactttacatttatattgcattctaaaggtgtgtttgatagaatacaacttgttctattgtgaagatttaaccttaagacaattgtgtttaggttgtatcttaggaggtgaaacacatgccaaatattaaatcagcgatcaaacgtacaaaaacgaataacgaacgccgtgcacacaacgcaacaatcaagtctgcgatgcgtactgcgattaaacaagttgaagtttctgtagctaacaacgatgctgagcaagcaaaagctgctctttcttctgctgcaaaacgcattgacaaagccgttaaaactggtcttgtacacaaaaacgcagctgcgcgttacaagtcaagacttgctaaacaagtaaacggactttctgcataatgcttgcaacgcctcagtgatgaggcaactgtttaactgtacgtccgtcctgaccggctcagccattaggacagactggcaattatacatctaaacaaaaacgaccctctttttagaaggtcgttttttttatgttcaagcgcccaatagtcgaagcaggaacaattctagcaatagctgcttgtcctttttaccggttttcatttcataatcgatcgttgatagctctttgacaatctgcttgagctcttcttctgaaaacagccttgcctgatccatagcaagtttgacgcggaatgggtggacttttagatttgaagcaatttgtttttgcccatatccttgctgagcgaaatacttcgtctgcaaaatcaatcgaaattgagttgatatgagtgctaatattttaatgggttcctcattttgtttcagcaaatcataaaacatctgcatggcctcagagcggcgtctgttgacaatttggttaattaattcgaaaatattctgctctaagcttcttgcaacgagctgattgacatccgctaattcaatttcttctcgttctccaatatatgtactcagcttcctgacctcttgaaacaatgtggatagactcccaccgcatagcatcacaagctgctcagccgcttcagatgtcatcgcctttccttctgttttcaccagtgtaatggtgaaatccgttgtttcttttgggtttaactcttttgcctcaaccatagccgctttcttttttagcaatttggtgattttcttccgttcatccagcttttcatatggtgctaataacacgagaatagtataaggcgccggcttttctaaataagcttctaacacagaaagctcatgctcaatcttctcctttttcttttccgctgtaagaaaataagggttcttgatcacaacgagccgcctttctcccataaacggaaaggtttctgcatccgtcacagcctgttcaagcggcacctcttccatatcaaagacggagtaattaaaatccttcgtctcctcgtctactacagcttgtcttaatttagctgctgtttcttgcagtaaatacgtttcttttccatataagcaataaacgggatggatatcccctctttttaaattgttccaaacttcaaagaccataaattgaatccctctctttcacttcctcctctatcctaaagtgtgtgaagacattagtaaagaggaagctgaaagtgccgcctcctcatttatagtaaacgtctggtgcaagctcccgggtcagctcgctgtcagacgatattcataaaatgatcatgaaaatggaaaacggttactttaccttctagcaattccaaatgagttcaagtatactaaaattagccaggagggatgaaaatgaatgaatttgaaaaaaatgttcaaagcaagcggaatgatgtgaccgactcagccgttggttttatcgtcacattcggatttttcgcctcaatgtttattttggcaacaattatacacctcgttggatcttaacttcatgattgctaaatgactgccgtttaggcagtttttttattgattttgtaagatatcatatggaggttgcgtgtaaaacgttcctttcttctcaagaaattcataggtcacactcccgtctcgatctgtgcggtacacctccatttgatgatcctttagttttttcaaaacttcctgatgaggatgctgataacgattgcgttcaccagccgaaatgagtgcataggacggctccagatgtcgaagccactcctcacttgttgaccctttactcccatgatgcccaacctttaagacatccgctcgcaggtggggataggcttctatgatgtctcgttccccttcttgttcaaggtctccagtgaacagaaaacgtttcccaccaagagtaaaagccagaacgagtgaatcattgttcttacttgtcacccggtcttgcgaagggtgcagaacctcaaatatgtgctctccaactcggagctgatctcctctttctaattcatcaataaatatcccttttttagctgcttcttttagcagctttgcgtcctctggacttcgggcaaagccttttggtatggccagccgctttactttatttcggttgattaaacgaaccgcttctcccatgtgatcttgatccgcatgcgtgagaatcagtacatcaagttttgctatacctttagaatgcagaaacgggatcagcgtttgatcaccgatcgtagatactttacgtctttttttccacggttcctcttcaaaagaaagtctgccccctgtatccacaagcagatgcccctttcgatagggcagttgaataaacaaactatccccctgtcctacatccagcatcgtgacctcccctttttggagaaagttcggagtaaaaaagtgtacactcaaaacaccaatagaaaaaagaagtggcacagaataggatttcacagaagctttgcactccatcacaaacagcagaaaaacaatggcactcacttccagaagaatatgccaccaagtagatttcataaaaatcaagttaaacccatcaaaaactgccatatatgctgacaactgatgacttagctggatgaccgaatcaagcagctggaacaatgcttgtccaaaagggagataaatgatggacaaaagaaaaaagagtaaggacagaggcaggacaaccgtcgtataaaaagggacaaacatcatattcaatgggatgctcagcaaagaaaattgctgaaaatgatataaaagaacaggaagtgaggcaagctgcgcaacaaaggatataaggaataactgcatcactgcacttttcgcttgtgataagattttggtcgataacaaaataaagaacgttaccacgaatgaaagctgaaatccgatatcaaatagatatagaggatgaatcgctaataagagtaaaaacgttgcgcttaatacgacagcagaaggctgtttcatttctttcggcaggctcgtcatcgctaaatagattcctgccatgagacaagctcttaaaaccgatggtgcagcacctgtcaaacaagcataaacaggaagaaagaataatagaagaatacgtgctgtctctcttgtcacaccggcacgaagcagacaccaaaataaacaggcaagaagcgtttgcacatgcagtcctgagatcgctaacagatgaataatgccgagcatttgatagtctcttaatgtgtcaggatcaatcaactcacgatcaccaaaaataagggcctgtacaatgcctacagagtttttcggcacatgatcttctaagaattttaagcccttttgtctcatcgcttgaagataataggaaggtctgtctttttttgtacagcctttgattgactgcggtaagaaaatggcgctaatgccttttgattttagaaattgatcgtattgaaacccgttaggaatggttgcgtgtttaggcggccgaacatcacctgtcatatgacagctcatacctggctctacatcttttagcgcctctttttcacgctctgtttgaatggtatagaaagcggctagccgttcatgttctgttgacacagttgctgaaaaacgattgccatctgttttcggaatactttcaatcacaacggagccggaaagaaatttttcttgtacaggttgatccgtttcaaaaaactcatgaaccataaaaataagagtataaacagctccacataggctgaccatcagaaagagccggggaatttttttcagtaggctgagaagtaatatgatgagaagaaagagaaggaaatacatatgaagatgatatgcagccagagcaattccaacagctgctgaaattgccccaaacggcaaataattaaacataggaagtaaataattgattcgccttctcatgcataacgcgaatttctgtttcactaagtcctgattcacttaacttgccaattaaatctgcaacaaaggccaatttttcttgattttttaagtcgatgatcatttcatccagttcaacttgttccgtttgaacacctgcctgctcaaataaatcaacggcatatgggtgatttttataatcctttgcatagtacacggttcgaatacccgcttgaataatggctttacagcactgcaaacaaggaaaatgcgtgacatatatttcagcatccgctgtaggtgcaccaaatttggcacattgtaaaatagcgttcatttccgcatggatggtgcgaacgcagtgatgatcaatgacatagcatcccacatctgcacaatggacatcaccagcaattgagccattatatccccctgcaatgatacgcttgtctctgacgatggtcgccccaacagctaaccgctcacaggtgcttcgtaaagcaagcaaatggctttgtgccataaaatattgattccatgaaattctttccacgagctgatccctccagaatgatggttggtattaagtgtacatgccttccttctataccgtcaattctacttaacggtcaattcacttttcagccgttcaatggtcttctccccaaaacctgaaatgttccgcaaatcttcaatttgttgaaattccccgtgttcctctctgtacgtaatgatggcttctgctttagctggccctattccgttaatagtttgcaattccgccgcatcagcctgattgacattgacaccttgactcttttcattacccgatggagcgtcagcagctgctatttgcgtctgcctctccgcttctccctgcttccggacataaatcatcatactgtcctctaattttgctgcttgattgatttcaatcgtgtctgctttactagtaaagccccctgctctccggatcgcttcttctacccgtgcatcagattgaaacttataaacacctggttttttcacagctcctttgacctctacaaaaatgggagatgattcatgatcggtcttttcttgtttgtcttctaatgtgacttgtatgtctttatcttccttcaatacacttggctctctgctgctctccctatttcctgcgaaaaggaaaaaagtgatgatgatcacgatcatgagcccagctccgatataaagactgtattttttcaatggaatgagtcgcttcacgtgctcacgcttctttcaatcatatttttctattgctcaacatactgtttagaagataacagatcctatgcgtctaaggagggagaacgtttgaatatagggataatcggtacaggaaacatgggtaccatacttactgaggcatttattgaatcaaaggcagtcaatccctcatccatcaccatcacaaaccggaccattgaaaaagcgttcaatataaaaaagaaccacccagagcttgaagttacgaaacagcttacaggagctgtcacgaataaagattttatctttgtttgtgtcaaaccacttgatatttatccacttttaaaagagctgagccctcttttaacagagcaccaaaccattgtcatcatcacaagcccggtacatcctgaacagcttcaggatatcgttccttgtcaaacagcacggctgattccaagcattacgaaccgcgctttatcaggggcgtcacttttaacatttggatcgtcatgcaatgtcgcgacgaaaacagcgttaagacagttagcttcctgcatttcaacacccgttgagattcatcattcgattacaagagcggcgtcagatatcgtcagctgcggtcctgcctttatcagctttctcgttcagaaaatgattgaagcagctgtcgaagaaacagatatttctaaagaagaagccaccaccttatcagaagatatgcttgtaggacttggccgtttgattgaaaaaagagtctatacccttccgacactgcaagacaaagtgtgtgttaaaggcggcgtcactggtgaagggattaaagcacttgaagcaggtgttcaagatatgtttcaccgcctctttcaaaacacccatgaaaaattcgatgaagaccttgaagcggttgcgcatcaatacccgccaagtgtgtttactgatgatcgcagaaattaatcatctctgcaacaagcgaaaaaagggttttaaaaaaccatcgttccattaaacgatggtttttggtttcttagctgaaatgaaatatctttcggctaattccccagggacttcatttgtaaaatcagcagtcacttctatctgtacaaagccagcggactcaaggaacgccgcatatgtctcaaatggaaatgtgcgctgttcatgtgtctcatcataacgctgatacacgtctccgtcctttacaaaaaagcttaaatcgtgaatgaccgaatacacgtcatcccctttatcactctgccaaatatagctgatctcttcatcctgatcggcataagtcgaacctgggaatacctcttccattttataaggtgtatgaacatcaaagagtaaaaccccatctgcctctaaaagctgaaacatgtttttaaaggtttttttgacgtcattttcgttttttaagtaattcaaggaatcacagcaaataaccgctgcttgaaagacttgctcaaaacccgtaagctctctcatatcttggtgtaaaaattgaattgactgccttttcgcctgtgctttttgctgcgcgaaggccagcatttcttcactgaggtcaattcctgtgactgtgtggcccttttcagctaaccgaagagaaatctctccagttccacagccaacatcaataatggcagcattcggtttgatattctgctggatccactgaacccattcatcataaggtgcatgtgtcatgagctcgtcatacacacctgcaaacccttgataaatcatgagttaatgccaagtgaaagcgtttctctcggcgcatctccccatagcttctctaggttgtagtatcctctttcttctttgtggaacacatgagcaatgacatcaccaagatcaatcaatacccatcttgcttcatcaaagccttccatcttcttcacttcgattccactttcctctgcaagatgttttacttctcttgcaatggcctgcacttgcttatcagagttcccgtgacaaatgagaaaataatcggcaacaagtgagattccttgcatattaagggcaataatatcctcagcccgtttatcatcgcatgctcctgccgcgacgtttaaaattgatgatgaatccatccaaattcctccttaattgttcttatgcacaagcgagttgtaagtagccaatgtatctggaaagactggctgattctttttcaataagaagctgatggtgttttttagtgactgaaccagcgcgctatccaaatcatgctctgctaactctcttacttcttcaacaccagggaaatgacgtcctggttcgatataatcagcgacataaatgaccttttcaagtaatgtcatgtttggcctgcctgatgtatgaaattcaatggcagttaaaatgtcttggtcgttaatagctgcttcctttttaaccagataagcaccaaccggggcatgccaaagctcaggcgaatattcaagcaatagagggttcatctgttccttctggataattcccttcatttcttcctttggtctaaatttcgcataatcatgaaaaatagcggcgatctctgcttttttcacatctgcaccgaaccgttccgctaatgaaatggctgcactcatgaccccgagtgtatgtgtatatctatgctctgttaactgctctttgacacagttcaatgcttcttcacgattcatataaatgatgctcctttatataacgctcaacagctttcggtatcaaataatcgacaggtttttcctgctttattcgctgcctaatcaatgtcgatgatacatcaaaagctggaacatctgcaaataaaagaggatatgccgtacttccggcataacccggtcttttcatcccaataaaggtaatcatctgaagcaaatcagcaatccgatgccattttggcaaatactcgaccatgtcagctccaatcataaaaaagaactcatcttcaggatgacgcttctttaaaagctccaccgtatccactgtataagatggaccctctcgctccatttcaatgagctccagccgaaaatgtggatttgactggatcgccgcttccaccattttcactcggtgacgactatctgctcgtttccggtctgttttatgagggggcttgtgatttgggataaaccacatttcatcaagccctacttgaaaacgcacctcattcgccatcagcaaatgcccattatgaggaggatcaaacgtaccgccaaacaaccctatttttttcatatcacatccacctttacggcagcttaatttgtttattttccttcgattctttataaaggacaatcacatttccgatcgtttgaacaagttcagcttttgcaccttttacaagtgctttcgcaacttccgttttgtcctcgtcgcagttttgtaatacgctgacctttaacagttctcttacttcaagcgcctcggaaatttgcttgatcatattgtcatttaccccgccttttcctacttgaaaaataggtgataaatgatgtgcttttgcacgtaaaaaacgtttttgtttcccttttaacatggtgttcctcctaatttctctatcacaattgacttcatttttctggcgtcaggcgtgatgcctgtccacaattcaaaggctcttgctgcttgtccaacaaacatgccgacaccatctactgttttcaaacctaacccggctgcttctttgagcagctttgtttctattggattatacacaatatcacaaacgaccgctgttttttttgcgtttgctaaagaaatcggggtttcttcaacattcgggtacataccgattgaggtcgtatggatgatgacatcatattccccaagtcgttcttctgctgtctttaaagtaatggcactagatgtgatgttcccatctgcactttcaattaaagcctcagctttttcaatggtgcggttggtgatatcaaagcttttcggtgcatagtcagcgattgtcgtataaatcgctcttgccgctccgccagcaccaatcataagaaatgacagctctgataatggcttatccaaggcttcaagcaatgaatgaagaaagccctctccatctgtgttgtacccgacgagctgacctccttcgagccgcaccgtattgactgcacgcaggcgttcagctgtcacatcaattttatcaaggtactgcataatgtctaccttgtgcggaacagtgacgttaaagccgctgattcctaaggctttcataccgtgaatggcatctttaaggtcttcgtcttctacttgaaagccatgataatgtccatcaatcccagcatccttcaatgctgcattatgaatatccggagacattgaatgaccaacagggttaccgattaatccgtataaaggtttcaaggtctctccccctttgaacatttaaattaacgaacgtctcataaacacatgaacgccttttggcgcatagactttgatttgcttccctgcatcatttgccgttacccatcctaagcctgaaaagacgatgtccattttcggctgatcaatcgtaaaggtatgcggaacgagcggagggaaatcttccatcccctcttttgatggcggtgatagcagttccccggcatgtttttcatataaatcatctgcgttctctaactttgttctgtgtatgttcagctcatttggcatataacagacaaatgacgttctgccgccttttacataatcaaatcgagcaagcccgccaaaataaagtgtttgtgcttcatttaattggaacgttctcggtttcaattcttttttcggcgctaagatcttcaagtcatttttgctgacatagtgcgccatctgatgacggttgataatgcccggcgtatcaaatagagcagatccgtcatcaagcgggatctcaatggcatcaagtgttgtacctggatattgggatgtggtgatcacgttctcttcgccagatacttctttgatgattcgattgataaatgtggattttccaacattcgtacagccgacgacatagacatttctttcttcgcggtaatgatcgatcgcttccatcacctcaggtacgccctgacctctgcttgcactgattaagaaaacatcgatcgggttcaatccgttttctttcgcttcccgtttcatccaatgaatcagacgatcttttttcacggatttcggtaaaatatctactttgttgccgacgagtaaaatcggattaccaccgacaatacgactcagcccattgatccagcttccgttaaagtcaaaaatatcaacgacctttacaatcagagaatctgtctctccaatgctgtgcaatatatttaaaaagtcgtcttctgttaaagaaacatcttgtatttcattgtagttctttaacctaaaacagcgctgacagatcacatcttctttcaatagagatgttgccggcgcatatcctaattgatctttatcttccgtctgaatggctacaccgcagccaatacaaacaaccttttccattattactcttcctcccactgaatgtggcccttacgctttaaggctcctaaaattctgcgttcaatctgcctgttaaacttggtgaaaaatccgtccgaggcagcgacagggacgaccaaaatcgtatggaagccatgacgattcccgcctagtacatcggtcatgagctgatccccaatgaccaccacatcttcttttttcaattgcatatcagagactgccttattaaaggctcttcccataggctttttcgctttataaataaacgggatatgaactggttcagaaaaaagcttgacccttttttcattattgttcgatacaatcgtcacttgtatcccgtgatccttcatttcttgaaaccattcaattaagcggggcgtcgcacttggacggtcccattctactagtgtgttatctaaatcggtaataattccttttacatttcgttcttttagtttttgcggtgaaatgtggaaaatgcttttcacaaattcatccggtaagaaatacttctttagcacaatttgcaccctttcttccattggtttttcagcgattgtgtcgaatcaaatcacaatttgtctgtctatcgaatacaatgaaaaagttttcgacatatgatgaggaccttcaacaggtgtggataattttacacacattatccacctatatttcatcacgctttcattcaattataaacactctacccacaagttatccacttcaccatgtggataacagaacgattgttcttgtttcccattcatggtagattaaaggtacttcagagacattcgatcaacctatgatgatatgtcttttccttaagttttatgccaactttttcaggggaggtgtttttcccatcatatgggtttctagtatgaaaaagctgtcagatgatttacttatagaatcgtattataaagcaaatgaaatgaacttaaatcgcgacttcattgaattaattgagacagaaatgaaaagacgttcgctcgggcatatgctctctgtttcctcttaattccatttcgcaggaaccatgcctcccgagcactctccttttttaaactcaggtgactgatattatatcacttgcgctataggcttactactattttccgtaaaaaacaccccttctcatcaaagaagaggtgtcttatttgcaaggctgttcattccaaaaccataaccctccgcctacgaccaaaatgaccacaaggaacacaacaagaaaagcgtaaccgattcctgctccttgagctggataaggtgaacacgcagggtaaggataagggcatccccacatatcagttacctccttctaggaagatatactgttagactatgctggatggatggtcttgtttaggcagatggccatcatttaaaaatgtttgatgacatcacgctctttgatttcgttataaataattcttgccccttttggcgtcatatgattgccagaagggtcgatcaaacctgattgaatcagcgcattgtcactatcttctccagcttctcggatgaacgctttccaattgtcgacaagcggtacttgctgatacttggctatttctctcgtaatgtcattataggaattttgccaagctcttgccccgcctctctcagcaaaataagatgacttatacctagagtagtaatacaagcccttttttccgccttctacaacaggtacacaggtcatgagaatcggggtaatgccttcttttctactttcagaaatgaagtaggatacattttctttaaatcgttttttcgtcacgcggggatgtttcccatctaaaatcgccgcatcattcgtaccgaacatgatgaggacgtaagttggtttctgctttaaaatatcctgctcaaagcgaagcttcgcgtcttcagttgtctgcccaccaatgcccgcattcttcacttgaatttggccgcgctcgacgtttttcatgagattcacccatttttcagatgttggataatctcgaaagtcccagtttgatccccttgtattgctgtcgccaaatgcaatgacactttcttgttctggctttgagcacccagcagcgacacaaagcaggataaaaagtacaacacatttcttcacaacattcacctccaaaagccctcttcatatagtaaacgacaagacttttggtttcaatgaatgactgtttttgacgaatgcttcctattgcagttgaacaggtacatacgctttgtcatgatgcagcagttcgctcactttgacaaattcatagcctcgatcctttaattcaggaatcacttgtttcagtgcttctaccgtctgcttccgattgcccccgccatcatgcaaaagaatgatatcgccgccttgaatatgatcaataatccggctcgcaattttgcgtgagcctggtcttgaccagtccttcggatcttgcgtaaatgaccacatgaccacatcatatccttgctttgacaaaatgcggaatgatgtcatcgtcaagcggccaccaggggggcgaaataataagggtccgccaggctgaagtgaagcgatatgagccgatgattcttttaattcctgcttgatctcctttgatgataacaggtcaaaatacgtatgattcatcgtgtgattgccaagctcatttccctcgcctacgattcgttccgcaatctctggatatgtatgaatacggctgcctacaacaaaaaagctggcattcacttgatgctccttcagcacatccaatacttgattcgtgtacactggatgaggtccatcatcaaaggtcagtgcaatcttttttcgttcctgtctcatgtcccaaaaagctcgtcctgttttttctaggtcgatcctttttaatgttcgagcctctattttattaggaacaaacgtgcatagcagcaatatacacatcaagacatgcaaccctctcatttgaccgcctccacagaacattcttacagattaaattgcccgctttttgatgaatcattcagcattcatagtcacggtccgcatctctgacttcttttttgacataaaaaaagccggcccatcaggcccgctttttatttcacgtttggtttctctcttcaactgtcgaacgttgcttagaattcatacagacactctccttcttggatttgattttgagcccataataatttctgataatactggttggacttctggtattgttgagaggcttctaaggctgtcgcaatttctagtgagatatcctctatataagagtataggctaagtttttccaaataatcaatggttttttgcagttgttcttcattcattccttgaacatataaagcatccagatactcaaacatatgacaaaacagctggtcttcatgcttctttgcagctaattttccatcttctaatatgcggcgtgcttccacttgttcattttgtctaaaaagcagttttgccagcgtatagagcgtatgcggaagcgtgggaagctgctctttacaggcaatatcagccgattccgttaaatagcgttctgcttcctctctatagcccagctccccataacattttcctaaattataaagcgctgaactgtatatccgcgggtgatcaatctgtgatgcgagctgttttgccttttttaaatgaggcagtgcccggtcttttcgttttagatcttgatagtttcctgagataacaaaaaggcactgaatgatgcgaatagagtaggcatcatgctgatcgtatatttccagcgcctttaaaatatgatgcatcgagacatgcgtttgcttcattatatagtaggcttctgctactttaaaatgaaactcagcctgctcaatatcatcaaataccatggacagctgtttttctgccactcgataatatttgacggcttctaaatattctttttgactaaactcatgcatgccacgaaaaaatgcatggtaataatgcagcatatcagataactcatgattggaattttcgattttatcgacaagattagatactgagaaaggttgatattttgaagggtgtatatagtcaagcatgatttggtgccgaaaacacatgagctgataataaatcagtaaatgctggtcctcttccatccgttcaatttccgcttctacttctgctttcaggatttccgcatctggaacactgaactgccgtatcattcgataccattcattaattttcatacctacatgtgaagaaagaaccttccccatgttccgaaaaaaccccttccttttcggtctaatattacatattttagcacgcttcttgaccgccaagcaccgcaaagaaaccgcaaacatatgagaagggcagcaaaaacagacgaacagaagcccgtttttttcgaaaaagatgattttttcatcgtacagacacagacaatccccccttcacatacatttgaggatataggcagtggcctaaacatggtggaggtgaaaatcgtggcaggagtatttacagcgatgggattgatggtcaaagaattggtgttcttagtgtcctatgtcaaaaacaatgcctttccacagcccctttcaggagatgatgaaaaaaaatacttagcccttatggcacagggcgatgaacacgcgagaaatatgctgattgaacataaccttcggctcgtcgcccatattgtcaagaaatttgaaaataccggggaagacgctgaagacctcatctccatcgggacgatcggactcattaaagccatcgaaagctattcctctggaaaaggaacaaagctggcaacgtatgcggcgcggtgtattgaaaacgaaattctgatgcatttacgcgcactcaaaaaaactaaaaaggatgtctccttacatgaccccatcggtcaggataaagaaggcaacgaaatttctttaattgatgtcttaaaatcagaaagtgaagatgtgatcgataccattcagctcaacatggagcttgaaaaagtaaaggagtatatcgacattctcgacggccgagaaaaagaagtcatcgtcggccggttcggtcttgatttaaagaaagaaaaaacgcagcgggaaatagcaaaggagctcgggatttcgcgaagctatgtatcccgtattgagaagcgggcgctgatgaagatgtttcatgagttttaccgggcggagaaggagaaacggaagcgggagaaggggaaataatatcaaagaagccggtctaaattccggcttcttttcattccactaagcactcaacataataaaaccatatcattggttatggagcttatttccattacactccttatattcatttgccatcgtttctatacgtttatgtgaattatggttaaaaatagtaagccaaaacaaggatcgttcgttactttttcatcttattgattaagaattttaatctctagtctatatatagtgttttttataaacatacagtaattaccatgtcgtggcatgtctgttaaagtaaccacctgtcttaaatcccacttttttataggaaaaattggatggctagttctccatgttttataattactgatacagaactccggcttgcagaagtttttctatcctttcaaaatcctttacataaatgatctcaactttttgactgctttcttcatattccccttaaaaattaataatcactttcccttttggtcgtccatttgcgactagttctagcgcttcatttacgttgtctatagtaaatagtattggatgaattgctggaacaatgttgttttcttcaatgattttggtaatctctttaagttgtgcgccgtcagaacgaacgaaaataaaatgatattccacgttttgtttcttagctttgcggtcataatttgcgccagcaagggaaaataacattcgtttccacaatggggaatttaggtatttcccgaaacgtttatttggtcctgtacggagagagagcaatcttccgcccggtttgatgatactcaattcactgtcaaattctttaggtcccagtgtatcaatcacgtaatccacattcgacaacaagtcaacatagttttctattgcataatccaaatattggtctgcacccatttccaaagtgcgttctcgcgcttctgagttgccacttacaatgacatttaggcccatatcctttgctattggtacagccatttgaccaaagctgcctgatccacctggaatgaagacagatttacctgactgtgcctcaagttcttcatgtagaccttgatacgctgtgagtccagccagtggtacagcagcggcttccacgtaagacaaattttttggcatgggtgcaattgcggcagcatcaattgcggcatattccgcaaaagcaccaatttttttaaggggaagacgtgtatagatggcatctcctacgtgaaattctgtcacattttttccgattttttcgataactcctgtcaattcattaccaagcgttaatgggaattcataatcttgaatcagtttcacgctgcctgtaataattaacatttcgagtggattgactgccgcagctttgacctttaccaagacttcgttttcatcgatttctggaattggaaggtcattgactttggcatggatattttttgaatacttggtgatctgagctgctttcatgagtgttttcattttttcattagcatccttccttgagattattacagctggtgttcccacactcaatcagtagaacagatgttagagttcatcagcccatagcgttcgaatgcagtacacgtcagccagtgtagcgcaattcatgcgtcaagcatttttcagttgtatgccatttttaagcattactgtccattttgcaggttcaatttaaaaactacttttcattccttttttttgttacaaaaatagagagtcacttcccagttccaaactgtttgtggaaccttgatatttgccataagttatacttatctcttgcgctctgctacgtgtcattggtgccatcgctaaacgattatgttaccatatatataaaaattagatttaaaggctttctagtattggaaagatcggctttctcaacttaaattcatagttttcatctacaacccccaccacttcatctttgtcataaacctccatcataaaacctgccatttgcttagctgtgtggtatatagggagatttgctttgtaatcaaactcttttatatcatttgcatgttttgcgaattctgtttcggtcattgctggtgctaaaacttttgccttcattttcgcacctttcagttcaagttcttttgcaagcccttcggtgaaggcactaacataatatttagaagcagaataagcaacactgccaacagcaattacatatccaagtgctgaggatacgttaattaattgagtcccctctacatcagcatattctcttacaaatagtgtagaaaggattgtcaaggattctatgttcacgcgtaacatggtttctactttatctaaattctgatctatgacagaagaggtttcaccaagaccagcattattaatccaagtctcaatttgatactcctttaaactgttatacagtgtatatgcctgatctttgacagataggtcacttgtccgaataataacatctaaaccaggatttagattctgaatggttgatttaagttcttctaatttatctaatcttctagctgcaataattaagtttttgccacgagcagcaaatgctaatgctgtctcatatccgatacctgagcttgctcctgtaataactgtgtacttcatattattctctccttaaaaatatttctcattgttcttgaccatgtttcagtagatcaaataagaaggtttccgtctttataaaaatctctgtaacttttttagtaaacgatttattccaatacgagatcttggctagatggcagatcataatcaactgccactcccccctggtcaccctcaattaggtcaatgccctgttctttgctgtgtggatctgaccatacgggtcaccattttgcgcggcatcagtcgtggaaggaatgccatgaaccggtttcgagcccctggcattatgaacgtcttgccgcgtaagaagcctcggtacccttcctcagccacctgcccggcctccatgatagcaccactctggaacaacttcgattccccaatacccgaacgttcaacaaagccggttgacgtcagtcccggacatagtgccgtcacagtcacccctgtaccgctcagttcgttctccaaagcctcagtgaacgacagcacgtacgccttcgttgcgtagtaaaccgacatcataggtcccgggaagaaagccaccaacgaagccacattcatcacgcctccttggccccgtttgaccatatccggcaagaacagtttcgtcataacagtcagagccttgatattgacgtcaatcatattcgtctcttgttctaactgcgtctccaagaacgtcccgtacaaaccgaagccggcattattgacaagatagtcgacgacgatccccttctccttgagctccgcaaaaatctctttcggcacaccgggtgaagccacatcctttgcgatgaccgtcgcttgactgccatatcttttctgatattcctttgcgagctccaaaagcttaccctcgctacgcgccaccagcaccaaattatatcctcccttggcgaaacgatccgccaactctttgccaattccacccgataccccggtgataagaacagtttttttcattttacagcacacctccatttttagtttaattaaacctttaaaacgttttactgcgtttcttactgcgagttgttactatggatgtaggttatcggtaattgtaatttttgtataaaaggatttatacttgccgcatatacctcaactaagacctcgccattatttattttgggcttagggaagtctaaaaaaatttggtttttcaccgtagttttcaatcgttaaaactttcatgacaatccttcacatttttaattaacgcacatgtatctatttataaagaatctaagaaaaaaagatatgaatatccctagatgggatattcataattaattaaattattttaagaaaggataatctgtatagccttcttttcctcctgcatagagcgtgtttttatcaggttcgtttagaggagcacctgaatgaatccgttctacaaagtctggattagctagtacccaagtgcctactgtgacaacatctgcaagattattatctacatcagacgaaagttgatctagaggacgacctggacggttaacaagaagtgcttggtcccaaagttgacgaacatcttttaggaattgctcgtttccaaagtgcattaaatgcagataagcaaggttaagcttatttaattcacttattaaatagcgatacatctcaaggctattctccccctcatcaatgccttgcagtgttccttgaggagaaaaacgaatgcctgttctttctgctcctatttcatcaacaactgctttagctacttcaattgcgaatcgagaacgcccctcaatcgtacgaccgtatgcaccttgacgatgattggagttttcactaaggaattgttggatcagataaccattcgctccgtgaatttcaactccgtctgcaccagcttcaattgctgaacgtgctgctaaacgaaactcattgataacatcttttatctcaagctcactcagttctcttggtgttggaatttctttcattccttctgccgtgaaaatttctataccaggtgcaatagctgagggtgcaactgcttggcggtggtgaggtgtgttatcagggtgtgatactcgtcccacatgcataagttgaataaaaatatgaccgccttcactatgaactttagaagtgactttttcccatcctctaatatgattttctgtataaataccaggtgtattagtataaccttgcccatcatccgaaggttgggttccttcacttataattaaaccgactgaagcacgctgaccatagtactctgctactaattcgctcggcgtaccatctggtaaagctctatttctagtcatcggagccatacctatgcggttttttaagtcaatgtttccgatacgaactttttcaaataatctgctcatatgaatactcctttttaataagaattagaatcaagaaataaatttacgtgttcagcaaatagttctggaaattgaaacagatgcccgtgaccagaatcaggatatataatcaactgtgctttgggtaatttctctgttaagatatagctgtttttagtcggtaccatcacatcattaacaccattagtgacaagtacagggtgtttgatgttttgtaaccattcataatcatgattagatttttgtttagcccattttgcaatagcttgtaattgtgcctcttttacttgttccgaactatttacttttttctgattaaaaattctttgtagtgaagctattcctgctgatttacttgtttcggtttgttcgtagaaaaagaacataaaatcatttattccatcttcttccgttccgccgtgacgattcattctttcaagaatttctggatttggattaataccagattcaggtgaagtacctgccataatcatttttcttactaaatctccttcttgtaaagctaactcttgtgcaaccatgccaccaatggaaaaaccaagaatgtcaacttgttctaatccaagagctcttataaatgttgctgtatcttttgccatatcagtaattgtagtaggtgttagtccatcggtctcaccaacccctttattgtcaaataagattactgggcgtttatttgcaataggttcaagcatgtctggatcccagttttccatcgttcctctaaagtgaacaagaaatactactggtataccatcttttgtaccaaatctcctatatgcgtaacgagttccttctacttcaataaattctgattctgttggtattttaaaatttctcatttttgtgttcctccttagaaattaaaaaacgatttataactatgcattatgatggtgtgtttcatgcttattttagaatgaacattctaaaaagggtaaaaaaagaaagctagtccaacactgaaagtgctagagaaatgatgccttctaattcttttttactgtaatcagtttttattagtactcttatacctaccaaattgttgtgtaagaaacgagatatgttatcagaatcgatttcttttgatagctctccattagtttgaccctgttttataagggaattaaacatatcttcagtacgattaaacatttttgtaacgatgcgcccaatttctttatccaacaaagataattcaatggctgcatttactgatagacatccttttgggtattgtttaatggaattcagtacgaaaataaaaacatcacgtatcgtctgtttaatggatgaagtgctgctgattatgctttccatctcattaacgatgagctcttcataatgatgaagggaagctaaaaacaatgaacgcttgtcgccaaatgtgtcatatatactcctacggtgtatccccatatgatccaccaaatcttgcatggatgttttttcatagccttgttcccaaaataactccattgcttttcttaatacttctttttcgtcaaactctttacttctagccattttaattctccttaaaaaaatccatgaaccaatactaacaaaaacaaaagtcatcacccattatagaatgaacattctaaaataaacacatgaattacaaaccatgattacataataccctttttagaacgataagtaaagaattatacttctgcgatgaacacccatatgtcaccaagtcttgcatgaatgttttttcataaccctgttcccagaaaagccccattgttttcttaatgctcttttttatcaaatttatttctagacataatcccaccttacaacgtattacctcttaattctgagaaaggactaagaatcattgatgcattcatccctccctcattctaaaataataaagaatgatcactctcgtttgagtagcaaaacagttagatctaacgtgtttcaagcatagcaaattcaagaacgatcggtaaagaatttggaattcatcatatgttttatatggttagctttcaattaaacgttttaacttaagctcagtttcagtattctcaactggagtatagacgctgcatcttaaatcagtatctccatgcacttgtaacgaagtaagattaaacaacattttacctaccttagcatgacgaaactcaattaatacttcaggagcagagcttatctcattttcattccaaattttatgaaactcaggatatgcctgttccatttcttgtataaattgctcataccagtcatcagccacatactgtccataatacgttctaaatattgcgatatatcctctaacaaaatgctcccaattcactgctaaacttttaaattcctttcttgcgaatagtaagcgtatgatattcctttctgctggggtgatttgttcaaaatccaaaaatacattagctgctgcttgattccacccaacaatctgacttcttctatctgatataattgttggacaataacgaagttcctgcaaaattttcactaaagccggactgatttccttctccttctcatttataaagggttgtttcactccttcctctaacgctagagcatacaaatatctcctttcatcgttatttaattgtaatgctcgagaaatagcatctaataccgaagtagacacttttatatctctaccttgttctaaccatgtataccatgtaagacttacaccggctagttgagccacttcctctcttcttagtcctggtgttcttctgcgggttcctacaggtaaaccaaccatttgaggagtaattttcgaacgttgattctttagaaattctgataaagcttgaagtcttgtttcaggtttcattaaaatctcctttttaaatagtgctaattatactaggataaacaacaacttgtaataggataacacaaaagttaaagttaataaaaaatagggagggaattattatgaaaagagttgtcattactggaatgggaattatttcgcctctaggaaatgatgtaaatagcttttggaatcaactagttaaaggtcaatcgggaatatctctaattgattcttttgatactattgattataaaacaaagatagctggaatggttcgtgatttcgatgtagatggaatatttgggaggaaagaagccaaacgattagatcgatttagtcagtttgctttagcagcagccgaacaagcattagaaaaatcacaattacagttagataaggttgatcttgaacgtttaggggtatacgttggttcagggatcggaggtatacaatcacttgttgataatgtgaatgtattaaataaacgaggtcccgcaagagtaagccctagccttgtaccaatgatgatttcaaatgcagctgcggctcaaataagtattagattaggggcacaaggcccgtcattatcaccagtaacggcctgctcaatcgggaacacctctattggtgaagctttcaatgctatccgaaatgatgaggcagatattatatttgccggtggagcagaagctgcaatcacacagttatctttggctagttttggaaacgcccatgcactatctacaaaaaaccaagatccaagtcgagccagccgtccgttcgatacagatagagatggctttgttatgagtgaaggcgcaggtattttagtattagaatcattagaaaacgctattcttagagatgcgccgatattatgtgaagtagtgggatacggagctagttcagatgctcatcatatggtagcatcacacccagaaggtaagggtgcctacttagcaatgaaaaaagcattgagaagtgcaaatatatcaacaggtgaaattgatgttattagtgctcatgcaacaagtacacaaataggtgatcgttcagaaattctagctattaagaaattgtttggtgaacattcccgcaaaattccaacaactgcaaacaaatcaatgactggtcacatgcttggtgctgctggtggagtagaagcaattgctttagtggaaagtttgagacaaggaattattcctccaactattaatgtagagaatttagatccagattgcgacttagatgttgtctcaaaaacgcgaaatcttccaatgaaatatggactatcaaattcttttggctttggcggacataattcagcaatcgtgttaaagaattatgattgaagatccacctttataattcagaggtgaaataaatgcatctaccaagggttgatcacccttggtttcaattttagacttgaaatctatccggctctgagagcgtacaaataaaaagctctatgaagagaggacaattttgagtgatacagaaagtatattaaacgactaatactactaacgatttgaaatctaatgaatgaatggtgaatatattgaaccaccacttagacggtttaaagaaaatgatgactgatgaaatacctgactctccagttaggcaaatccctggttttaaagtatgaagctgtagaaggtagaatagttattgagttgaaagcttctaaaagaacttcataatccgatgggtacgttacacggtggaatattgtgtgacatcgctaatgccgctatgggtcggtctgcttttgccaacactcaaaaggaacaatggcagaagcaaagtcatatgtgtatttagagcttttcttgcggcagggggaaatcctaccattcaatcagcggttgtatacagcctccttcaatctcaatagaaaattcgccattcctttgtttccaataatcttcgcgcttttgaaagataatatctttcattatacttctcccggattttccactggagctcctgtggggccataatacaaaaacataaaatctctccttcggacctattcaccaacaacttaatcaattgttctatttccttcaaatttataaaatgcatgtgtctgttgttttaattttagcatgctgaatagctttgggtttagcttttgagcagcttcagtgcttacccattttacttcttcaatatcatgatccggatctagaatgttcatctgcccgccgatgatttccgcaaagaaggtcacgatgagtgcatgatgcattttatcgtgaaagaatacttctcgaaccgaatgaagttcatttactttgcaaacataccctgtctcttctttcacctcacggaccacggcctgctgcaggtgttcacctttttctacagtaccgcctggaagttcccaatatccctttacatttttgaccattaacatattttcttcctcatcataaataatagctgatactacgtctactcgtttcaaagaaatccccccaaccattctctgtttacatcaattgtcgaataaatagaacgaactgttcatttcaatacattcattatactgtatccttgatacaagataatggatacagaaactaaataggaattagtcagcagattggaggccacagcatgtggatcatcatcattttacttattgtcctcattggatttacagggaatatcgtttctttattaagacaaatgaaagagtcaaacgagaaaatcatacaactgttagaacatcaaaaaccgaaaaaataaaaacctcacccttttagagagaggtttttagagtaagcaattattcttatcgtttctcatgaagcaacatatatctgattcgacgaatataatgcagcgcaatatgaccgagacataaaatgagcccgatcatcgcaagaatatagatgggcagcatcaaaccaggtacatagttgacgataaaacccaaacaaaacgctgtcagcatatatagactgatcaacctcatcaataccatccgaagccctccctttctacattcactttaacatattttccctttattttcatgattggcttttaaaaaaagatgcgaatccactaagattcgcatgatcattacgtattcaattcacctttcttcgcgcgcgcttccttccactgctcaagctctgaaactgttaataattgatatccttgtttggtcaattccttgataatcgtgacagctgcgtttgccgaggtgtcatagatgtcgtgcattaagaccgtttctccgctagacgcatgtgtgagaatgtagttggcgacgtattggctgttgcgatatttccagtcttcaggatctacgtcccaaagcgtgactttcatgttgacagcttcgttgatctgcccatttgttccaccatatggcggtctaaagtgagtcggtgtgaatccgcctgctttttcaataatttgctgcgtatcatctacttgtttgatagcttgttttaacggcagtcttgtgagtaaaggatggctataggaatgatttccgatttcattcccaccctttctgatctcacccagcatatcggggtaatattgaaccctgctgcctaatacaaaaaatgtcgcatgtcctttgttttcttttaaggcttttaagatttttgaggtcgtggatggatttggtccatcgtcaaatgtcagggcaatggctttttgatttgggttgaatgttgcctgttttggcagttttacaagctttctttttgagatcggttcttttttctcatttttgttcttttctttatgaatatattcaggctttaacatgcctttaagcactgtttttttaatcgccagcacttgagggccttttttgtctggtgcgatttgccctgctggaaagtagaattctataaaacgatccttgatggcaaaatactgataatgctctgccgcaggagacgttccttgtttgagcaaatgctcattttcagcaagagtgcgatctttttttaattcctcaaatgtcatttgagacagtttttgcagactttctttctttaataaaaatagatcatctatagataaaaaatgctgtttcttgaaatcaaaattgaatatcttcgtttcatgtgcgccttttactccgcctttcaattcatatgtattgaatttgatcgcagcagtttgtttggcataatgagtaatctcgtaatctatgtttaattcgtatcgatgatcttcatcgacatcgcttgcttcactaaatgatgttttgaatttgtcgagcgctgtttctgcaaatcttttcatctcttgatctagctttttttgatgaaacaccggatagttgactgcatatctcatgtatctcccgtcattcacgagggtgactatctcaacttctttgtagctcgcatctggttctaccttcttcttctccgtcccgcttgcctgctgattatgataaaatgcagcgattccgatgatgattgcaagtccgcataggacgagactgattttccatttcattgacacaatgattcccctctcgtgatggcgccatgtcttgatgacgtgtgtttgtaggatagactttcggtgaacccgatttagtttgcaaaaaataaatttgtcacattttagacataatttaagagaggaatagaaaaaaggacttgatttctcagccctttgattatttttgcatatatagttgaaataatttcgtttcttcatcaatagaacgtgctcgatcaaatgccgctctgaccgtctttgtattgtttaagagctcgtacagcatggtcaagacaaagataaatgccgcatctccatcaatgtaatcatcaggcgctgtataggataaagcacctgcttctaaaaaggcttctgcaagttttttctcacctagtgtgcagccggttgatatgacgtgaaccccttttaatgaagcataccgcttgatttcatccgctccaaaagttacacctctaggctccccatcttcgtatacatcttcccctaactccggcatgagaaacgctccttcttccccatgaaaagataaaagaaagtagtccgtctcccttctatttctcccagataacacatcaatcagatcattgggtctgcctatccaatgcatatcgacttttgcaccaaagttctcaaatgctgcacgcagggcaaaagattctagctcactatttggtcctgttgctaatgtaatgcgcatggtctgttgttccacttgtatctcctccaaacgatgataaaaataaacccattttttcttcatctgcatatgtatccgtccattttagtgcactgatcaatacatttgctcgatgtcctgtcgttctcgtgcgaaggaaagagcttccgtcatcaagacttgcctactccctttccgcgggcaccagccgttacatacatcactgctacattcgctcggtgctttaatttctgtaaggtttcttggatgagcgtgaccgtccccacaagctgcccttgataaaaggtgccaaaggtccacatagattgtgccgaagtaaaacgagccgcatatttgtcttttgtatctatttgttcttcttcatagctcatcgcaaagccctctggatgtaatcgcagtgcttctagtcttaatgctgtaaattcttcagcatcacctgcgttaacaattgaatattcagacaaccacctccaacagaatgattgatacttccaattttatcttgaaaggaggttttgatcaaaggatattgatcccttagcaccaatctcttttcctacatgcaattagacatgcttatccatctgcgaaaacaaggtatttccgatcatgtttactcgttttatcctagcaaaaacgattcttttctcacttatcttttcaccttttttatattaatctataactaattcatgaaaaaaaagaaaaaaaaggattgctatgaatgaaaagatatcataagatagaatagtaataaaaagtcaaaaaagggaggaatttgatatgacagaaacaagaaacgaaatcaaactacatgttctttttggtgctttagcagtaggtttccttatgctagctcttttttccttctcgctacagatgctgccagttgctgatctagcaaaagaatttggtattccaggcagtgttgcagctgttgttttgaacgttgttgaagcgggcggagctgttacaacaatcgtctccattttaactgctgtaggatcaggtggtctttctcttattgcagcggctggtaaagagaccattcgtcagtaccttaaagcccaaattaagaaaaaaggccgtaaagccgttattgcttggtaattcatttttatgactcaatagaaggagactttgttctccttctatttaaattttgatgcaggtgagaagatgttatatccattattatcactacttctatcaattagaattcaacaacaatattcaaatctagctcagtttataatacgtaaggttccatttttcacatcgttttcttctaaacagtacatattattttcttgtatccttgatactttattcggatgtatgattgtattcgttatttcttcatttctttactctccgatctatcaaatagaatgggaaagtacttttgtgatatttttgtttcttttctctatcgtcaaagggattgaatcttatagaagaactcatattcttccttttgaagaattgatacagcttgcacctgtttcctcaagacaccttttccaaacgcttttgttttcagaactgatctggttgatgttgaccagtttgagtacttatttaatctattttctgtttcaatattccattgcacaaacacatgactggatattctggttaaagcatctcaatgtcatgttgacaggtttcttcctttttatcgtcagcaataagatatttggtgcttacatctataatattgtcgtgaaaaaaatcgggatcattcgtgttctttttttcgcaagcatctctttactttttttcttatttggaagagtcctgatattgaacattattttccctttttatcacaccttccaacaactttttcagtcgatttcatcgcttgcagaggattcgttttggattacactttccaacaatttggtggctttatatcaaaatgatcttcagcatatccatcatgctttattctcaaaggattctgtatttctacaatttcaagcgcttttcacttcacctgtcacatttttcgtggtgatattagcagctatactcgtcatgaagagtcctgtacgctggattccaactgggaaagatcatgatcaaaactcaacacattttcgagatttattttattggtactttcaagtacttaataaaattcaaggctcgctgtttcaaaagaatatgttgatccaaaaagacctcaaggtgttaaaagaaaaaagatggctgctgtctaaagagttttttaattatatgtttatgtcatatgaagccttcttttatatcggggttatgactagtttgatctccattattgatcatccggctttgcagattcagctgctttttacattaaatgtgatgattttagcaaatcaaacgtatgagatgagaatgctgaccccttctattttttctttaagtgctgaaaaaaagaatatttggctttttgagctttctcaaacatctcttattcagtttttcttatcaaaaatccagttattttattgtttattttccataccagctctctttctgctattcattaatctatcaatcatgggtgtatatcagctttttgatattcagatgctcattcaatttgtggcattagggattggttttttcattttccctttgattcagctttacttgtttccatttacaacgaaattcaattttattcatgagcatgaaatagggacaaccaatgaggaaatagaagttatcgataaagggcaggcttttgcaagaaactttcttgtattaccttttatgtactacatgatcttgacctcttttctacctattttgcagcaatcctcaggtctcataaactttctgtttgctttatattttgtgatcgtttcattgatctgctgggtgttatgccgcaagaccatctataaagggattgagtatgttgaaaaaaataagatattttctatcggagaatagactgattttacgactcggctacatttatgctgctatctttattgcagcagtgctgattggtagccttcttccttatgatcagattccttatttaaaaaaggatgaagagatgttttttctatctattttcttaaacaatttgcaagttgggatggcgatattagggatcggagcttttacaggcggcatcatggctgctggcattcttttttacaacggatacattattggcaaactagttcagtatttgattgtcaatcaagaagtgcagcagatcttcacaggattactgcctcatgctttcgtagagattcttggtttcatcctgttttcaattgtcagctcttttccttttatttatctttatcgatttataaaaggagaaacaattgatttaaaaaagctgactgtgactgtgcttcaattgatttttgcagcaattgttctcttattcgcagcatctcttttagaggaatacgttagccatgtacatctaccatagaagaaaggggaatgtggttccatggagctacttctacgacctaaggaatttttcaatcagaatcaatcgattaaaaccattgtaggccttgtcttactatcattatttgtttcgactgtctttttaacattttttattattgatttgttagtagatgaaccgttatcagctggaaaacaagtagccagcattgtttttatttttttgctgacgatcccgctgtatttcattttaaattttctcagtaccgttctcacttctatttatatgtatttttttcataaagcttttattttacgcaaaatgtatcttgtcattttggtttataatgcatttcttttattagtgaatagtgcagcgatctattgtgtgatggtgttacaattagatcactattttatcttgatacaagcaatttccttcttcatcaacttatatcttttgcgcatcctttatgatggcatcatttactatgcagaagggtcgaaaaaagctgcccttgcgacagtgatcttgtatatgctggtgaccactgtgtttgttattggaggattcatcaatggctagtcttcaagtgtctcagctatcttttcgctatgaaacaacagaagaaagctctctcctcctcgatcaagtttcgtttgatctgaaaggaagcgatcgagcttgtatcattggaaagaacggcagtggtaaatcgactcttttaaagatcatcgctggtctgcttccttctgtatcagaaacgattttactcaacaaacagcttcaccccgggaccactcaatataaaagtctggtggcgtacatccctgataagcctttagtctatgatgcgctcactggtcttgagcacatggagcttgtccagtctttatggaaaatgaacaagtcagaaaaagaattatacaaagagactttcctatcgctttgtgatgcatttgatttaacgcatgccctaaagatgccagtcaaacagtattcattgggcatgagatataaacttttctttaattgtatggtggcaagatctccagagctgatcattcttgatgagccttttacctctcttgatgaggcctcacagatacaatcgatttctttattaaaaaaagaattctcacatcgatgtgttttatttaccagccatcagcgctacctttattcagaattaggaaatcgtttcttccagctggatcaaggacaattaaacgaagtggaacattagacatacaaaaggcatcccataaaaggatgcctctcttctttttctcgatcacattaccacttacagcgtttcactggacggcagcaagggtttttgatatccctgccgcaatcgtattcttccacaatgtactcgttatgagtagattgagtgacagggtagtagttttcaattcttttgatgtttttattgacgtttgtgatatgcgttggatgaatttttctgatggtttgttcattcgttgtcgtgttgacaatttgacgtgtggggaaaacaaccgtttcatctcctccttggtttcctctgcgaggaccaaagaaaaagtcatctaatcgattccggctcatctcaacaccccttcaagttgtctttcacttacactctatcgtatgtaagaagcgcctttcgtgactagatgcttgtctatttttaaaaaaatccactatttatctcgttttctcttcctttacaaaaggacaattttaacatattatacaaatgatatattgtggtagaagaaattgtagcccataaccttcccacttatcaaatacgaggtgaacgatatgatcaatacgacacaaccaatcgaacgaaacaagctagacattgcacttgaactgactcaattgcatttgaatcaatatgaaacgagtcatcctgatcagttgagtgaggtttatgcgaaatattatgcgctgcttgaagtgctggatttatcttcttatgatcaattgattgatttattgcccgctgagctaaaacagacgcttgagtaaaaaaaccctctatccacatgggatagagggttttctttatacacgtgctgccatatcggtttcgatttgctctaagcttcttccttttgtttcgactaaaacaaagcgggtgaacaatagtccgattaagcagataaccccaaatgaggagaaaatgaccccaaagctgaacttatcagctaagatagggaaaacgagtccaacagctaacgatcccgtccagttaaaggcagatgaaatgcctgctccaatgcccctgacagagagtgggaagatttcgccgatgatgatccacgtgatcggtgcccatgagaaggcatagcacaagataaagcagcaaagggaaatcaatgtcacccagtttaaaatcccttcactaacgccaagtgcacctaatgccgctggtgcaaagaaggaaagtgccatacctgtgcctcctacggtgagaatcgttcggcggtcgaaccggtcgacaaattgtaaaaagataacggttgtcacgacaaaaatgacaccgacaatgactgtaaagcctgctgcgacctgcggcgcaaggcctacattccgagcaatactcgttgcataatacacaatggagttcgcgccttgaatttgctgaagggtcgccatcccaaccccgatgaaaagagccattctgaatttcttttggaacaattcacgaataccagagcgttcttctttcgcgacttctaaaatttcctgcatttctgcttcgatttcttcacgggaagaacgcagtgatcctaatacctcccgtgctttatgagccattccgtgtttaattaaatatctcggagattcagggagcctcagcataccaatataaagcacgatagcaaataaagcggcacttcccagcatccagcgccagctgtctggaataggttcaaacacaaacgcgacaatatagctcagcaatagtccgctcacaatcataagctgattgagcccagacaatttcccgcggattttagcaggagcgatttcagacatgtaagccggcaccaaagatgaggctgttcctactgctgtccctaaaaagatacgagcaatggttaatgaaatctcttctggtgcgatagctgaccctatagctccgacaaaaaagatgatcgatgagaccaaaatgagctttctgcggccaaacttatcccccatgaggccgcttaaaatcgaaccaatgattgctccgcccattaatgaagagacgacaattccaagccataatgggctgagctgaaattcttcctgaatatgtccttctgcccctgcaataattccaatatcatatccgaataagatgcctgcaaaggacccgaaaaagaagataaatttgcttgacacttttttctccaagtggatgaccccctcacttaattaaccgctttcatttctcccggtgcttctactgtaaacagtagaagacgtttcacccttctataaaaccacatattctgcatgaacaagctttgtaaaatgaacaatttgatcaaccgttaaattaagggatacgactgtatgatgacccccgccttgcttaatccatgctttgactccgtcctgaaaattcggcttgattttccagagcacacgtgcaaccggtaaatgaggtgctgcttcctccggctcaaaggcttcgacttcttgtatgagccatttgaaatgggttccaaagtcagcaatggaaacaacaacaccttcgcctgcttttccatcaaacacaagacgcgctggatcttccctgtttccgataccaagtggagatacgacaatcactggtttcgtatgggcgagcgctggatctacttctaacatatgagattgcagcaccgcttcctgtccagaggtcatttcatacgtgtagtcctccataaaaccagtggattgatgatgactcatcacctttaataatcggtccagtgcagcagttttccaatcgccttccccagcaaagccatatccctttgccatcagccgctgtaccgcaagtcctggcagctgtttcattccatgtaaatcttcaaagtttgtcgtaaaggcattgtagccgccttcatctaagaagcgtttgatggcaatttcataacgcgcttgcaccttgacacttttttcccattcttcaactgaatacgttccataatccacatcatattgcgttaaatactccgcaaataatgcatctacctctgcttcttctactgcattgacatattcaacgagatcgcctattccaaagtaatcaacagtccaccctaattgaatctgggcttcaattttatcgccttctgttacagccacgtggcgcatgttgtcaccaaacctagctactttaatctgaaagctctcatgataagcagccgccacgtccatccaatcagcgatttgctgctgcacatccggcttagaccaatgaccggcgacaatttgattttgtttatttaagcgcgcattgatatagccatattctctatctccatgtgcagattgatgaagattcatatagtccatgttgatcgtgtcccacggaatcttctcataatactgtgtgacaagatgcaaaagaggcttctgcaagagatcggttccgcgtatccacatttttgccggtgaaaatgtatgcatccacgtcatcacgccgacaacctcatcgcgataattgacttctttcatgagctttgtgatttgatccgcgctgacagccagctcctgcaagatcactgggtaaggaagtaaaccactctcatttaaggcatccgtcatcttttgagcatctgcttttactttctgcagtgcttcatctccatataaatgctgcgatccaacaataaaccagcattctttatgttgacttgttaacatagaaatccctcttttctttatcttgaaggtttttgtccgtaatacgcatgttctccgtgttttcttaagtaatgtttatctaaaattcgctgcgggagaggctccgcgtattcgtttaattgctttgcgaacagattcattttggcgacttcatctaaaatcacactgtttgtgaccgcactttttgcatcttttccccacgtgaatgggccgtgaccttgaagcaatacacccggcaccgccatcacatctaggtttctttcctcaaacgtttcgatgatcagccggcccgtttctacctcataaccgcggttgacttcttcttctgtcagaaatcgagcacacggaacagcgccgtaaaatgtatcggcatgtgttgtgcccattgcctgtaaatcaagacctgcctgcgcccaaacggttgcccacatggaatggctatgcgatataccgccaatttcctcaaagtgtttgtaaagaacagcatgtgttgctgtatctgatgaaggactgaattccccttccactacttcaccgtcaaagtcgaccacaaccatgtcttttgctgataattggtcatacgctataccgctcggcttaataacaaatagaccgctgtcacgatcacacgcactgacattgccccatgtgaatttcacaagtccgtatttcggcaaatctaaatttgcttcaaatacttcttcttttaagcgctctagcatacggttgtcactcctttctttggcatcagatgtgctactgccgcttcttcaatcgcaaggccctcttgatagcgctttaaaaattcgtcaaagcctttgacatcaagcgggtcgggttctatgagctcttctgatgtatgggcaaacacttgatgcgtgagaaattcagccaatgtttgcttttgatgatggaccatataggaagcaaggacagccatcccaaacgcaccgccttctcccgcagtggaaacgactgatacaggtgtatcaagcgctgcggccaccattttttgaccaacgagcggggttttaaataaccccccatgccctagtaaccgatcaatcacaacctgttcatgttcttttaaacgatccatccctattttcattgcaccaaaagcagaaaaaagatgggtacgcatgaaattagccagattaaagcggctttcagctgatctgacaaaaagaggccttccttctggcaatcttgtaatattttcaccagaataatagccatagcttaagagtccgccgccatctcgatctgcttctaacgcctgctgcaataaggcttcgtataccttttctgacgccacttgcatacccaatgcttcaaatgcctctctgaatatattcatccaagcatttaagtcacttgtacagttgttcgcatgaaccattgcgactggcagtccgtctggcgttgtgaccatatccacttctggatacacaccctttagctcctgctctagcacaatcatggcaaaaacagatgtcccaactgaaatgttccctgtccgtttttctacactgtttgttgccaccattcccgttccggcgtcaccttccgggggacaaaatggaatgcctggcttcaagtgtttgccttgatctaaaatggctgctcctgctgccgttaacacgccagcctcctcgcctgctaaataaacacgcggcagaaggtgacgcagcttccacgggtagcctttttctacgatcaagtcttcaaattgatggagcattacttcattgtagtccttcgtttgttcatcaattggaaacatgcctgacgcatccccaatgccaatggcctgctttccggttaacagccagtgaatgtaacctgatagggtggtcatatattctaaacgggaaagatgtttttcctcttctaatatggcttgatacaaatgggcaatgctccatctttctggaatatgaaattggaagacatccgtcagtttttgactcgcctcaatggttgttgcattccgccatgtgcggaacggaacgaggacctctcctgtatggtcacatgccacatagccatgcatcatggctgatactccaattgagccaatggtttgaatggtcacgccatacctttgctcgacttgctctttcatctcccggtacgccacttgaagacctgtaatgatatcaattaagttgtacgtccaaattccttcctggagagaactttcccattcaaatgtaccttgagcaattggctgaaacacttcatctattaaaatggctttaattcgtgttgaaccaaattcaatccctaaagatgtccgtccttcttttaaggctttggtcgtctcttcatgatccattctgcgttcacctccataattgatagcggtttcaattttaattttctagattcattgattctctgtgcacattcacaatataatatttgtacgtacatatgtcaatattaaatgtagttgtacatacacaatatgacaaaaaccttcacttttctaaagctgagacgacagaaagggaaagcgcctgtttttgattcgacaaccatgttaaaatatgtccatacaatttcttctcaatccgagtagatgatcaactgagaaagaagtgaaacgatgaaaaagaagtaccagatcattatcgatgatataaaaagcaaaatactcacaggggattaccggatcggggaacgtattccaaccgaatcaagcctgcaggagatgtatcaagtgagcaggcatacggttcgaaaggccatcttagaattgtcgagcgaagggtttttacgaagtgaaaaaggttcaggcacatttgtgaccaatcaatatcaaacaaagcctgctggacatacgcatatgaaaacgattggcgtcatgacgacatacatatccgattacattttcccttccatcattcgaggcattgaaagccgattaaacgaagagaactattctttgttactggcaagtacgaataatgatgtggaacaggagaaaaaagcgctagaaatgatgctgtcctttggtgtggacggactcattgtcgagccaacgaaaagcaatttatataatccgaacatctcgtactacctatcttttaaagaacaggatgtaccgctcattatgatcaatgcctattatgaacagttagaggttccatttctctgtttagatgatgtgaagtccagctatttagccacaaaagagctgatcacctctggacatcagcaaatcggcctgatctcaaaaacagatgacttacagggaaagtaccgaatgaagggatatattcaagcgctcggtgaagccaagcttaactttctgcctgagcacgtcctctttttcgatacagaatcgaaacagcatttgggagatgatatcaaaactttcttattagagcatcagcatgagctgactgcccttgtttgctataacgacgaggttggattagaagttgccaatgtatgcagtgacatcgggctgtccattccagaggatctctccattattggacaggataattcgtatattgcccagaaaaatgcccatgtgaagctgacaacattgacccaccctcaggagcaaatgggccgggatgcggcagactggatgattaaaaaagttcaaggaaaaaagaatctccctcatcaaaccttttacgaacctgaattggttccaggtgaaacgatcaaacatatgaatgcaagaaaaaaatgagccctttttggaggaggctcattttttatatgattagatctcttctttaggggcaggcactgcgcatacgccgtctgcacatgctgcttcaaatgaattggcagccgctttctcagcttgagctgcttcttctgtccaagccgtttcaagtgcacgaaggaaggtatcggctggctgtgcacctgccactgaatatttgccattcaataagaaaaaaggaacagcagaaataccaagctgtctcgcctctttttcgtcttttcgtacatgatctgcaaaatcttcgccgcctagaacttgctgcacttccttcaaatcaagacctgctttttctgcaatatctaaaagggtttgacgatcaccaacatgctttccatctgtaaaatatgcttgaaacagctctcccatgacgaaatcgcctttgcccatttgaccagcatattgcgccaatcgatgggcatcaaaggtgtttgtcaacacgagtggatcaaattgaaaatcgattcccttctctttgccggcctgcttcacctgctcattcatcgccatggcctggctgcggctcatcccatattttttgacgagcatatcatggacatcataatcgacatcaacgggtgcatgtggatcaagctcaaagcttttaaactcgatttctacctgttccttttgagggaattgttcaagcgctgtttctagttgtttttttcctatataacaaaaaggacaggcgatatctgaccagatttgtactttcatcttcatcttccttccgagcttacgctttttctttaacgatgtaacaattatagttacatcaaatagatgatgtcaagattctgctcttgatttagataaaaaaagcctctccttctaagaaaggaaaggctttgaaaatatctattctaaatttgcatggtgaccgtacattgtatgtgtgtcgagctcttttatttccattaaacgcaaaatgaccgcatcgtatgtcagaagaagcgattgctcaaatagcgagcccattggctgaatggtataatggcttccttccttttgatccttcggcgcacctgacagtaaaatgacttcatccgatagatcagctagaggtgagtcaactgaaagcgtgaatgctgccacttttccgccaattgcttttgccttttttgcaaggactagcaaggtctctgttcgaccagagccgctcccaacaatcaagagatcttcttctgtaaaggaaggagtattggtctcaccgatcacataagccttgacgccaatatgtgtgagtctcatggcaaatgatttccccatcaaaccagatctgccagcccctgccacaaagacctttcttgcagctaaaatacttgagacaagccgctccgcttgttcgtcttgaatagcgggggaatgctcagaaagctcattcaaaatggctttcacatagtcactggtcttcatgattgtgcgatcagctgcttcatttgtgcagccacttctgctttattgtcctggcttgcgataccgccgccgacaatgatcaaatcaggatttaacttcacgacttcaggtaacgtatcaagcttaattccgcctgcaatggctgttttcgcttgtttgacgacttgtttaatggtcataaggtcagcaaatgagttttgaccaaccgcttgcaggtcatagcctgtgtgcacacaaatataatcgactccaagctcatccagctcttttgcccggccagcgatatctttgataccaatcatatcaactaaaatttgtttccctcttgctttcgcttctttcaccgctccttgaatggacatatcttctgccgctgcaagaatggtgacgatatccgctccagcttcagatgcctgctgcacttcataaccggccgcatccataattttcagatcagcgagtacacgtaaattcggaaatgcctgtttgacttcttttacagcacgcaagccttcattgatcacaacaggtgtcccaatttcgaccacatcaataaatgcttctacttctttgatcagctcaatcgcttctggtatattcactaaatctaatgctaattgtaatttcattcactttcactcccgttttttcatctcatcttcaaaagcttcgcggatggtgcttcttgaacgatgaaatgagtataacaacaggatggcagcaatccaagtacgcactttttttttacatactatactttttcgcatatggtcacaaaaaagatactgtctttcgaccagtatcttttgcactttctatttatcatcctttaaaaaattgctgtcgagatattgttttccccaatcatacatcgcctctaaaatcggcattaagctttctcctagttctgtgagggaatattcaacttttggcggaacgacaggataaacctcccgatgcacaatgtgatcttcctctaattctcttagctgattgacaagcattctttgcgtaatcccaggcattaacgactttagctcaccaaatcgttttgtcccttctctgccaaggtgccataaaatcagcattttccacttaccgccgataatattcagcgtcagctctttttcgcaattgaacactttattttccatacgtgatgacaacgacatacactcctttggtacaaaccattttacgctttatcatatactgcggcaaattagattgtcgagcatacggtcttcgttattgattctgtttattcacaaaagacatgacagcctttgtcatttcttgcgcttcttttggcgccctgtctgatccaaaccatttattcaagttactgtggctcagcgaatgaacccgaaaaacaaaccgcgagcctttatcatgattcagtttttctgcaaatcggtacacctctggattttcccagcccgtgaccaaataaacaggcggtacattcgcttgattcatataagtgacaggtgatgcctttgtccagttcttctcctgtttgccaaacacctttttgtacgatggtatggcttgtataaattgattgatgtttaacggtccatctaaaatcacgatggaattgatcgtttttggcgacaatccaacacgttttaaataagttgaatctgtggccaccaatgccgttaaatgaccgcctgccgaatgtcccatcatgttgatttttgatgaatcgatttgatattcatccgcatgatccttgacccatttaatggcgtttgccgtatcatctgccatctgctcatagttggcatcagggtgaagcctgtaattcatcgaaacaaacacatacccttgatccgtaaaataatcagcctttgaagcgactctattcttatcgccgcctgtccagccgccgccatggagatagatcatgactggatgcttcttcttatcttcatttttgccctttggcatatacatatcgagtgtttgctgtttgttttgtgtgtctgcataatggatgttcgtcgtcggcttaggctggtttaaacggaacacaaagaatgcgcataccaataagcccgcgatgacagccgcaaataagagccatttcgtgattcgtttcaatgtcattgcacctttctatgttgggatgaagaagcatgattagcacatatgtagatagactagcacgattcatttgatacgacttgtatgacttgaactgtttgacaataaaatgaaaaataatcttcttcatagtcttctacaaagtaattcaaattttcccagcctctatccaaaagctgaatgtccaaaaaaagataggaatcgtttgttaactccaaatctttgatttgaacagaagagacattggtgaaattcagatgaatgtctgcttgtagattcgaggattcatatgggatgtgcagaacaatacagttgatcaagtcgtaatgttcattatactctttaaagtagtgaaattcattgatttgctttagatggttgatatcgaaatcagggatttgtttctggattttttcatctaaaaaccatgtcatcgtttgtcccccaagaggttattgtataagtgcaatgattcgttttcttgtttcttcatggtattgaatacatagcgttgttcttcttcccaaaaacacattaaaaacatacactcctttgtaagttgcgttcttgatttccacaagtgttatgctattctcattttgctttatcacgataaccgtacacttgtataaacaggtttatttgtatgtttgaataatgctacttcatgatcagttagccatttaatctctcgcatatgataagaaattacttctaaataggtatcggtttcagcaattaatttttttgataaatctttcctttattatcttctataacaagatagagagtaaactgctttagatccaattcgatcaaaggatatgctttcttttttttatcgggacttaattttgtttgttttcctttcatctccgctttatattccttttctttcattttttgaattgtcgctttgactagctgactgtcccagttttttaattcacacagatagagcatcgctttttccaaagtatcagctaagatctttttcttatttgttgcattttcaaattcactgtaactaaaggataattctaactcgtacgtattttttaaaaataagatgtcaggttcttttttagaagtactcagtaatttgtaatctttaaaagagccacatataaaaataatagcctcacaatctttcgtttgaattttttccctaattcccataaaaacatttctgtcacacaaagggattggctggctaagttcccacggtcatcatctgacattaattggatgtatttcaagtacactccttatacctcctttctagaatcaccatctccccattagggtaaaggcacgccacattcataaatcgtatttcatgttgagtttgagctatttttttacttttcatatcttgactaaaacaccttccatattcaactgatagaccataatttttatttatatgaaattattctttttagggatttttctaataaatcaattggtatatggtcttgactaatatagtggaatattgctacaccattttccagtgaaagaattgcccatgccatttcttcagaagaaagggcacatgtaaggttctcttttttcatcaaattctcaagggattgcgatatttgttttaccgattgtaggatcatatttgaccactgacaccttacttcttcatttctcattgaatacagaagaaattccatgtttagcagactccacgtccgattttcttcacgactttgaatagactgttgattcattttttctgaaaagtgtaaaagagaaggttgttctgctattaaagcattgattttttctacatgtaattgcatttgttgtttcaatagtgccaaaaagatctcttcctttgaatgaaaatgcgcataaaaggcccctttgctaaatcccgcatgttctgtcaatttatcaatggagaccccatgaaaaccatacttggcgaaattctcaactgcagaatttaagagtaattttcttgtttcttctttcctttcattttgcgtctttctttgtctaatcattcctttacctccttttcttgacaatcataccatatagaattaatataccaattagtatataaattcaaaagggtatataatgtgaaaaggagaaaaacaatgcgacagatggggaaaaaaattcacaaaacgaaaatggaaataatcgctcaaacagttaaatcagggattattaaatcaaatttgatcccaatgtgtgctggcttaaccttggcattatacacatatcaaattgacatccttcataaatctattgagatactattggcttttgcaggttcaattttattaattggtgctgctggagctttaaacaatttgtatgatagggacatagattcagtgatgaatagaacaaaaaacagacctactgtaacaggagaagtcaatcctaaaaaagttctatggcttagtattttaatgtctgttttaggactaggctttttagcatttacaacctatctagcagctattataggattgattggtttatttttttatatttttccttatacaatatggagtaaaagaaaaaccgtatacaacacagaaattggtagtatttctggagcaatgcctcctctcattggttgggcagctatttcaccagatatatcacacccagctattatggggttgtttttcattacaattatttggcagatgccgcatttttattcgatagctattagaaaacaaaatgaatacaaggcagcaaacattcccatgttaccggttgtaaaaggaatgaaaagaacatacttacaaacgaatctttatatcttagcaattaccttaagcagttttcttttccattctttaagcatagggcttgtgcttgtatccttttttttaggccttatatggatttgcttaagtattttgggttacaagcgaatgcattccgagaagtgggcatcaattatgtttgtctattcactaatttatatgacaactctttattcaacggtcattatctattctcttactcgtcaaattttttgattaataaaacattagttttgtagataaccataataagttcatataaaaaagcaccctaaacggatgcttcaatcaaatgatattttttcaaaatgcgataggtgatttcttttgcttctattccggtgccttcgatatttgtggcgaagatgtaggttttgttttcatgtttgatgaagcctacgtaccagccgatgcctgagccggagcctgtttttccgtatagggtggtgtgtttctcttcttcttgaatcatcattcgtttgaccgttctcatggcgtttaggtcaaatgggagagtctcttcatatagctgtttgaggaaacgaacttgttcaactggagaaatacgtaaagtactgcttaaccaaaattgatcgattccgccagatatgtcttcgttcccataatgaatggctttcacccactgactcatgcgttcttcaccgatgtcacgggccatggcttgatagtaccagacgactgaatctctcatgccagatcctagtgtatgatccctattccagcggtcaatctctcttttcactccgtcccaatatttgatgtcatattcatctctcactgcgcctgtttggagtccaattaaggcatttgctaccttaaatgtcgattgaggtgcaaagcgctctttcgctctttttttgttatacacccaaggggacttttcttttacttcttgaatcacaaacgtgccttcccgatctttcatgaattcatctactgaccatgctggtgatgctccttcagttgatgaaggctggcttatacaaagtgccatcagcatcatgccagtaatgagccattttatatactttttcttcaaaacaatcgctccttttcccatgattccattgattgtagcatgttgagcgatgagatataaggtacgcttgtcctcttttctttcaaacaaaaaaagccggttcatccggctttttgctgtatattagctttcttttttctcttcaatggcctgtttcgccatttttgatatcgtcatatcgtccattggcgggttatggagcccggcacgaatatctcgatagtagcgctgcagtggacagtctaggcttaagcttttcgcaccgactaaacgcatagctttatcgacaacttgcaaactatgattaacgacagtatgcttcacagcaccaaattcattgattaacagctctcttttttctggctgttcatacaatgtggtcgttgagtagatgacgtggcgtgcttgctttaatagtaaatcgatttcaccaatcagtgtttggacatttggcaggtcactaattgtgccgttgatgctgttcggtgaatgggtgatggcatactgaacagcatagtctcttgccgcttgcgcaatccctaaatagcaggaaggaatgtgtgcaatccaaggatttagcgtaccaccccgcggccctttttgcacctcaacaagcatgtcatctgagaccttaacctgatctaagattaaatcatggctttctgttcctctcatgcccacaacattccacgtttcttctattgaaacaccttctgtctcacgatgaattaagaagaaacccatcgcctctttttcttcgatccatacgccgactaaaaagtatgtaagcgctggtgacatcgttgtgaaaattttacgtccattgatgatccactcatcatctgatctggtggatgttgttccaggcttcccacctcttgttggactgcctgtctgcgcctcgcttacggcacggttgacaagggcgcccttcttcacttcttccgcaaagaattgcagctgcttttcactccattgtttcttttcgtagatttcgcctacaaccccttggtgccagccgattgataaggcagttgctccgtccatgctgccgagcgtctcttgaaacagaaccatatccttcacagattgacctccgcctccgtattcagcaggaagagacaacgtcgtatagcccatctctattaatgattcaatgtttttttcaggaaaataagcgccttcatcgtgttcttttgccgtttgttcgatcgtttcacgaagagattctagttgatgaagccatgttttttgaaaatcggtatcaacaaataatgctttagacaaaacgtatccaactcctctgtatctcacaatctatcatatctgatttttccaatcggaataaataaaacatactttacttataggatttaatgtgttaaattttatcaatattaagtacatatgtcaaaggaacgtgatgcttttatgatttcagctactaatctacataaatcttatgggcagacccatgtgttaaaaggcattgatttcaccgtacaagaaggtgaagtggtcgccattattggaccgagcggatcaggaaaaaccacccttctccgcagcttaaacagccttgatattccagacaaaggagagctgacagttggtgaagccacgattcaatttgaacgatatcataaaaaagatctgctaaaactcaggcagcaatcttccatggtgtttcaacattatcacttgtttcagaataaacgagcacttgaaaatattacagaaggattgatcgtgtctcaaaacatgtctaaaaaagaagcagaaaaggtcggagagcaatttttaacgcggattggactgcttcataaaaaggatgcatttccgagtgaattatccggcggtcagcagcagcgaattggcatagcccgcgctcttgcgatgaacccttcagtgcttttgtttgatgaacctacgtcggcactggacccagagatggtaggagaaattcttgaaatgatcaaagatattgcgagccaaggaatgacaatggtcattgtgacacatgaaatttcttttgcaaaggacgtggcggatacggtgatctttatggcagatggcgaaatcgttgaaaaaggctcaccagaagacgtcctgttgaaaccacagcatgaacgaacgaaacaatttttatcaaggattcatcgcggaatgtggcaaggatcggagaaagacaaatgaagcaaaagacagcattcatgatgtctggtgtccttctgtttctcctttctctgattggctgcagcagtgtgaaaaccacgacagatgacggcagacaaattgtgaaagtcgcactgagtgcagaggtcaatccaccctttttagcaacaaatgaccgaaacgaaccgattggctataacattgattatttaaatgaagtggaaaagaggcttccccacgtacattttgattacatttttggcgaggaagaatccaatttaatcggtgtaggcgcagggaagtttgaaatggcggctaattggttttttagtaaccctgaacgtgaaaagcggttcctttaccctaaggtcccgtatggctattcgatgacaggtttaattgtgaatgaatcagacaagaagattcgatcgcttgatgatatgacatctaaaaaactggctcctgtcagtcctagcggaggcttgcgttcgatattaaatcaatataataaagagcatgatccggatattccactgacgaccattgaaagtccttcaaatgaactcaacttaaaacgtgttgaaagcggacggtccgatgcagcatttatgaacatttcaacctttgataccattcaaaagcatttgaacctaaaggtcaaagttggcggcattgtgtcaaaggagcctatctatcttgtcttacagccaagcgagaagcagcttgcagcagatttggaccggatcacacaagaaatgattgatgatggaacactgcctaagcttgcgaaaaagtggtttggtgttgatttctttcaaaatattgatgacatctcagagcaaggggatcaaaatgaagaaaggaaggaagcgtcatgacgtttacagctggagattggctgcgcatctttttacaggtgcttgaacgcctgccactcacttttctcattattacggtgtcattgttttttgctatcatcatcgggttgctatttgctttcattcgtatcaagcaaatcccagtgctgaagcaattggctgttatctatttatcttttacacgaagtacgcctttaattgttcagttgtttttgatttattttggactgcctcagcttttacttgtcgcagggattcaaatcaatcattgggatcgtgtgttatttgtgatgatgacgttttctttacatactggcgcttatttatctgaagtctttcgcagtgcgtattcatctgttgggaaggaccagctggaggccgcctacattgttgggatgacagatacacaggccttgatcaggattattatcccgcaggcctttctcattgcactgccaaacctcggaaattacaccattgatctcgtgaaagacacagcgattgcctttacaatcggacttattgatatcatgggacaggtgaagatcattttaggaaataactacgggatcggcatgtttgaagtgtacgcgatcattgcgattgtgtattggctcatttgcatgagcattgaactgatcaccatgctgcttgaaaggaaatttgtaaaaggccgcaccagcctgtcacgttaaggaggcgctttgatgcaaaccattgatattcaatttgcgattgaccaagtacctcatattctaaaaggcgttccttttactttattgattgcactcgtttccatggctgtgagccttttgatcggatctgtttttgctttcattcgtctctttcgcattcctgtactcaggcagcttgtgacactctatgtctccttttttagaggaacgcctcttattgttcagctgttcgctttcttttatggactcccttttgttctaatcaaagtgagcggtacattcgggctgacctttcatccagatctggtctccccattagctgttgccctcattaccttcagcctccattcagccgcccatttaacagaggtggttcggagtgcactccttgcggtagacaaagggcagcttgaagcggcaaaaattgtgggtatgacgacgcgccaggcgatgatgcgcattattttgccgcaggcctttgtggtcgccttaccgaatctaggcaatcagctcattcagctattaaaagccacctctctttcgtttacgattggagtacttgaaatcatggggatttcccgaatcattgcgaatgacggctatcagtttttagaaacgtacctcgtctctgctttgatctattggctgctgagcattttctttgaactcgtttttgccttgttagagaaacgtgtcagcgtgtacggaagatctctcggacgttaaaaaagccgatcaggctcaaatacctgaccggctttttttattcgccttttttcggtgtgttaaacagttcctttggtgcgggttttagttttggtgcggaaccgaacacgactggtgcagaaatatatctgaattccccttttccatccatgcttcggccatatgcccatctgccttccttgcttgcttctcctcttgagaagttaaacaaatcgtaggatacttgctgtttttctagtgagcgcgggaaggtggttggtacgacgacgtccccttctcgttcttctaattctttaatggccgcaagccacatattttgatgatatgtatcacgagcaataagaaaagaaagcatatccttcacgccgggatcatcggtcatttcgtagagccttgtaacctgaagcctcccttgtgattctgcatttaagttggccctaaaatcagccattaaatttccacttgcaatgatatacttggcattccacggatacccttgactatctgctgccatagctcctaaaccggcaacaattgcatgctgaggattcattccacccatgacagctgcaagtgctggatcactttgatacgcctgttcttgttctttaaccggtgctttatctagtaaacgcgcgatcatcgtcgccagcatttcgacatgaccaatttcctctgtccctatgtcaaacaataaatctctgtatttttgatctgcccggcaattaaagccttgaaataaatattgcatcatgacactaatttctccatattgtccgcctaatacttcttgtagctttttcgcgtaaagcggatcaggctttgagggctttgcttcatattgcagttctttgatgtgataaaacatgatgtcatctcccttatcaaaacatcttttcacttatcactattcaaccacatgcctctttatgaaaatgagtagaatatgtgcacaaaaaaagagaatggcctctgccattccctttgtcatcctactcagcactaactaaaattttcacttgatctttttcattgattaatgcatggaaaccatcctcgatcacatcgtccagcttgatttttttcgtgacgagcgtatctgcagagaaatagccttttctcattaagtttaatacagatgggaatacgtctctgtagccgataattcctttgactgtacgttctttaatgacaatgtcatttggcagaatttctgcgcctttttcccaaatgctcacaatgactgtttcacctgaaattcttgttgattggattgcttgcttcaatactacaggtacacctgtcacttcaaaagaaacatcgacgccaccgtttgtacggcttgcgatttcttgaacaacatcttcatattgagaaggatcaacaatgatcgctccaagctctttagctttttcttggcgttctttagataattctactgcgtaaatatcagtagcaccagctgcttttaatgcttcaatgacaagtaagccaattggtccgcagccaaacacagccgctgtatccccagcttgtactttactagaacgaacagcatataaagcaactgcagaaggctctacaagcgcaccttgctcatatgagatttcgtctggtaataaatgaagtaattcttcatcgacagatacatattcagagaatccaccgccgcctccggcaagtcctaaaaagcccatgttttcatctaagttgtaagcaccttggtggccgtgagtcgcaaaaataggctcaacaaccactcggtcgcctactttgtaattgctcacgccttctcctacttcaacaacctcaccagagaactcgtgtcccagcgtaacgggtgctttttcttttgtaagtggatgaggttcattcactggaatgaaaatcggtcctcctaaatattcatgtaaatcactaccacaaatgccgcaccattttacttttagtttcacttttcctggagcaactgttggttcgtcaatttcctctagtcgaatgtccttttgatcgtgccagcgtagtgctttcatgtgtaagactccttttctcatcaatttgattaacttacttaaataatcataacataatttttttaattttctaagtaggatgcactatttttttgacattcaatggacgaaagatgacaaaacatagtaataaacagacaaaaagcatacatacacacccgatgacaacggaggttcggattgataaaacatgtgcaagtccaccagagacccctgtcatcatcatcgtcagaatggcttcaaccaaagcataaaaactggctaccctccccatgacctctaccgggatattcgtttgatagaaagtcataaaacctgtgttcgcaaatgataagaagaatgctagtataaaaaaaccaacagcggctacaaacaatgtgctggaaaaagcataaatgagatagccacatgcaacaaacaaactgccaatcccaagcatgatcgaaacaggcagcctctccacaatcaccgaattgagacctgcgcctgtgatgatgcctgccccagctatactgacaagaagaccatattctgtatcagtcagcagcagcacttcttttgcaaaggctgtttcaagagagtcaatggcagtaggaagtaccgtgatggcggcactaaacaacaaatacaccgccataatctggcgtgatgtcaaactaaaccgaagaacaagcttcgcatcctcttttaacattgaaagggaaaagccgttttggccagcatcttgttttagcaaattcggtaaacacatcgttaacagagcagatatcaacaagcagatcgcatttatataaattgaaaaaacaggtgtaccgattaaaaaaagcagacctgctgctgcgggtccaagtaaaaatccacccgattgtaataatgagcgaatggcattaaaccgttttcgattatccgccgggatcaatcctgtcatatataccatcgaagctggatgaaacatcgcttgtgccatttgaatgagaaacaccatcacatacaggatcagcagatgtcctgaaaataacgcaaagggtacacatgcgatcaggatagcccgggtgatatctaagctgatcatcacattccgctgattcagcctgtcaaccaaactgccagaccagctgtttgtcaaaagagctgcagccggtctcagcatatagacggctgttacagccagcacagagcccgtttcttgaaaaatgagcagatggagagcaatcatataaatccattctcctatgttcgcaattccgatggctccaagcagcaaactcatatcccgccaatgttttttcatagctgttccccctatttgtcataaaaaaatcccgcccccaagacatttctgtcttgaggacgggatttactccgcgttgccacctcagtttattcatctgttgccagatgaaccttagcaggtcatcatgaacccatctctgtaacgggagaatgtcgctgcaccaccatccgaaggaatccggtgcagagctaagaggcttggttccatcatgcttcccagctccttctcagcttaacggagttctctgtgcgggacagctatgatgtactcttctctatttgcgctgtgtttttatttcatcacgatcttcagctgaattgttacatattgtactgcgcctcgatcaaagcgtcaatgtttttttcaagttaatcagcatagatcatctttctggtcatgccgccatcaacgactaaatctgtacccgtcacaaattgattgtcttcatctgttaaataaaagcaagccttcacaatatcctttggggtcccgactcgattggaaagatgctgcttgtggtcgacctctcgaagattctcctcatccttcgtttcaatccatccaggggaaatgctattcaccgtgatgtgatccaggctaaaagaagcagccaaggcatgagtcagtgctgatattccgccttttgatgcagcatatgcttccgtatgaggctctgacattgtcgcgcgggtggatgaaatgttcacaatagaaccgccttttggattctcttttatataacgtgctgcttctcttgcacatagaaaagtccctcttaggttcgtatgtaacacacgatcccactcatcgaccgttaattcataaggcgatactgtgcacatgacaccagcattattgatgaggatatcaatcgttttgcagcgctccgctgcaaacgacattaagtgttgaatatccttctcttgtgtcacgtccgtttttttaaaataagcttctaacgattcttttttcagatcttcctccaaacgcttgcccttctcttcatctatatctgcaagcaccacacgcgctcctccttttgcatagccccaggcgatcgattcaccaattccattggctgcgcctgtgatgacgacggttttattgtgaaagttcatcgtttattcaaccctttctacatcagatgttgtcgtctatcataccattttgagaagtacgcatgaataaaaaacccctctatcgcaattgagagcaatagaggggttttttaaactaatagaatgaaatgaagaaaagtaattaataggatcggatatttttcaaaccaatcaccataaaaacaatcgtaaaagcagctaaaactgttatgtctaataataagattgagtgattgacagtaccgctcatgatctcgccaaaaccagacatcatccatgtttgcggtatagccaaagagatcttcttcataatgtctggaacgatatctaatggccaataaataccacccagcatgcatgatcctacaatgataattgcactaaatacttcagcttgcttttttgtatgagataaggttgcaatcataaaacctaaactcacaacaagccctataacaaatgatccaaacactagaataagaatcaggttgcctaagtacacatgaaagaacacagataagacggtcaaaagaacacccagttgtatccatccaaggaggaaataagccattaaatagccaagcagcacatatattttatggataggactcgaaagcaatctttgccatgtataatctttatattccaaatgaatagacgacaccgagcttgagatcgcaaacatcataaacatgatcgtaaaaccaagtggtattaaatttggttgctgacttgcttgactatctagattgtcttcatccaatgaaatggtgccagattcgtttaattctttcagtgcattgataagagaaacgctattctgctctttcacaccttgattgatctgataaatgatggccgccgtctcttttaaatagggagctaagaccgcatattcctctgttttcttataaaccgtcacatcaaaaatttctttattttcttttaaatgggattttaattgattcgtgactgtaatagacgcaactgccttttcatcggataataattcttttgcttcacttttagtcgcctttacccaaagaaatttggtgttcttttcgagaatccgaaaaatttcttgattcagattatcttgactaggctcttgaataaaagcaactgtaggtttctttttatcagatgccgtacttccaaaaataaaactaaatacgattggcataacaaataaaaaaataagggtcaaaggggactttaatgtttcttttagctttaaagtaataatggctgatattttatgcataacgatgcttcctttcaaaagacattctgattaaagcaatgatgaagaaagctagtcccatcccgcagctaagcaataaactgctttgaatttcactaaaatcagcacctgacatacttttcaaaaacatttggagcgcaagggaattaggtaagaaataactgatgttgatcaaccattgtggaaataagtataagggaaccatacttccacctaaagcagctaacacttgagttcctaaaatcccaacactgttaaacgttttttctcttttgataaaagaaccaatcagcaccccgaagcccgcagcattaactataaaactgcatcctatcatgaaaacagtaaaaggctctccccagttcaccttaaagacaaaactagtaaataaaataatgatcgcaagttgaatcatactcatcaaaagaatacccaataacttcccaacgatgtaactagtattgcttaattttgatacaagtaaccttttataaacatcttcctctttttcctctatcatactgccaactaagaaaacaacagtcattaataaaaaaagtacacccatcccgcctgcgtagtattggaaggatgtaatcggctggctgttgatatgaatattcctctcgttcaccagttcttttttcagttgatcagacacgatctccacttctttaccttgattcaacggtaccagaatacgattcatatgataattttgaaagaattgcaaaaccacattttctagaaccatttcttgtaagtttgaattaggtcctttcaagatattcaattgcacatggtcatgattcaataagcttttttcaaaatccggcatgatgattatacccattgtaatgtctctactatttaaatctctctctagctgatttttcgaggtgaccttcacatcaaatatgtcactgagttcactcttagacaatgttgaaagaaacattttacttgtagcggacttatcttgatctgttattcctactcgaaatgaattgatcctgatttcactatctttcttcatgttatctccaaatgctgcacctaatatagcaattaatatgataggcataaaaaaaagtgtaaaaaagctttttttatccctaaaaaacaataatagatctttcagtacaacccaaatgctcatatgctcacctctaaacagtctaatctctcaaatttttactagttaaatacaaaaagacattttctaaatttggttctacaatttctgctgagataatttgaatatttaatgcggtcacaccttgaatgagatgacttaataactgctgagggtgttgatcaaatattttcatttgatttccttgaaccacgatttcctttaaagggtcgacttcatgtatgaattgacgcacccggtctatatcattttgtccatgttcacattttatggtcaaaacaatttctctttgatttccgacaagctcacttaattcatgctgatcccctaaagcgatgatagacccatgatccataatggccattctttcacataaaaattcgacttcttccatgtaatgactagtatatataatggtcattccttctccatttaatgtcttaactgtttctaatatatgatttctagattggggatctatgcctacagtaggctcatccatgattaatagtttcggttgatgcaatatcgcgcaaccgatattcactcttcttttcattcctccagagaatactttcacttgatcattcgctctatcttcaagaccaattagctcaagtgtttcttgtactctgctttttaactcttttcctttgagtccgtacattctcccccaaaatattaaattttcttttgctgtcaaatgtaaatataaagcgatctcttgcggaacaattcctatcatttcctgcgctttttttgtttctttttttaaatctataccttcaatcattatggtgccgcttgtggcatggatcagccctgacaagatgccaatcaatgttgatttccctgcaccattcggacctaataatccaaatgattctcctttttttaagtgaaagtttatcccttttaatacctgtttatcttcataatttttcttgatgtcgtgtacgtttagcaatcaatacctctcccctattttcttcttattgaagcctgtattttacctcttcctagtcatttaatatcaaataaattatctggtatggtcttcaactatagaataatttttccaatttatatattttaacatgagatgcattacaggagaatagtacaggtcattttaaaatagaacataaaaaaacttacaggaatcctcctgtaagttttttcgattaatttcattgaatcattatttagaaatcatcccatgcgggtcaatcacaaatttcttcgccacacccgaatcaaagtcgctgtatccttgaggagcttgatcaaggttaatgacggtcgcatttaccgctttggcgatttgtgctcttccgcttaaaatggatttcattagactgcggtgatattgcatgacaggggtttgacctgtcacaaaggtatgggcttttgcccagccgagtccaattcgcactttcagagaaccaacttttgcatcagcatccacggcacctgggtcttctgtgacgtaaagccctgggattccgagcttaccgccaactttggtaatatccataattgtatttagaacggttgcaggtgcttctccttgatctccatgacctgaagcttcaaagccgacacaatcgacggcacagtcaacttctggctctcctaagatattcgtgatttgttcgccgatccgatcatgttttcttaaattgatcgtctcacagccaaagcttctggcctgctccagcctttgttcattcaaatcaccgacaattaccgcagaggcgccaaggagctgagcggaatgtgctgcggcaagacctactggcccggcaccagcaatatatacagtcgaaccaggctttactccagccgtataagcaccgtgaaaacctgtcgggaaaatatcggaaagcatcgtcagatcaagtattttctccatcgcttgatctttgtctggaaatttgagcagctgaaaatctgcatatgggaccatgacgtactcggattggccgccaacccatccgcccatatcgacgtatccataggcagagcctggacggtccgggtttacatttaagcacacatgagttttttgttccttgcacatgacgcagcgtccacaagcaatattaaatggaacggacacaaggtctcctttttgaataaactccacatctcgtccaacctcaacgacttcacctgtaatttcatgaccaaggactagtcctgcaggcgcagtggtacgccctctcaccatgtgctggtcacttccgcaaatattcgtcgtcactacttttaaaatgacgccatgctcacatttgcgccccacattggctttcggtacacccgggccatctcttaaaatcaaatcagggtatccaatatcctcaactgctacatttcctgctcctttataaacgacacctttgtttcccgacatgttttcattcctccctttttgtttaaaaatgaagtctctacaattttctctatttatgaagcaattccctgcttcaaatggcacaatggatgaaaaaaaaagcgaagaatgtctatcacggagagaaaaatgtatcttccagtcaaataaaaaagaaaatattgaaaaaaaagctaaacttttgaagaacggtgtcgatataagaaataagccagacaggtatccttaatcgacaaacaaattccttatatatactatcattccttacacacctggctggcgcctacataacattgaaaagactcttctgatgaagagtcttttttaactttgcgtcccatcaatcacggatacaattgtaagcaaagaggctcctctgacgaagagcctctttttaaacgcttgttcattacctgggaaatattttcatcattttaacgctttgatacagatgtatgtatcatagtgataaaccgaaacttctctaaagtgatacgctgaaaataggcggctgatctcttgttcactatacgatgaaaaagattgtgaccgtttttgttccttcatcagttcctgctgttggaaagataagaatacttctccatccacttgaagaacgcggtacacttccttcatgacctgctcaatatccttcaagtaatagatggtctgtaccgtaaataatttattgaatgatctgtcttcaaaaggtaaatgctcagctttaccaagagtcacgacggctttatcctgttccacaagcttcttatgttttctttttgcatatttgatcatatgacgagaggcatccactccatatactttaccgcgatcaagtttttctgctaccttcgataatgtcatgcctcttccagtcccgatttctaaaatccggtcgttttcttgtatatttaagagttgaatcgtccattcattgatattatgatgatttttttccatatagcgggcaacccattttgagaacaagccttttggttccctcatttgttttccaatccagctttgaatcaatgttaacacctgctttgcaccagtaaataaaactatttacgaattttcttacttttcatatcggctctcgcctaacaaagtttaagacctagtcctaattagttgtcattgattagacggcatcttttcagaaaatgtttcgcagaacttttaaaaattttgttctgaataggcgttttcattaattgtgctcagattgatttcgttttctgcatgagctgcatattttatgaatgtatcttgattagataaaggtggtgctagattatgggctttggtggcggttattctggagactgcggtggttacggtggcggttttgcaggcggattcgcattgcttgttgtactgttcattttgttgatcatcatcggtgcaagctggatttgctaatgtaaaaggagcaggaaacgtattgtttcctgctccttttctttaataccaataagttggataattgtaattgtacatatagcgtctaagcatttcttgttgctctctttgcattcggtatggattgccgtacccgtgctttaaggaatgcggaatggacgtatacccgtgccccactgacggaaacctcatatatggtgacatcgacattcattgatcacctcacaatctccttttacggatatcatatgtgcaggtgatcaatgtggagcgtgtctaaacctggtccttctccctagtataacaatcaagcattgcaagcatcataaacatgtcaatctcctccttttccaatttttcttttcctgttttagttcatatactttagttgtttctgcttcatttcttcataaaatgtttcgacttgttgttcataaagaacggtctcaatgtctttgtatttacgctgaatcgtcaatgtaataaagaataaatggattgtcatatacgctcacctcccttcagttcgcagcatgcgaaatagcccgcagatcttctttatcagttgacctgcgggcacacaaaaatgcagatcaaaagacaatgtcttccaacctgcaatggatgatgcgtgaaatcctcgtttacttaaacagttttgaagcgtgcaccgtataaggtaaaggaaggacacgagctcttccacaggctgatgacatgatgaaattgttggttgaattgatcacaagtagatacgaataacatattcttcagcctcctttacgtttttaattactttgtaagtatatccagcaagcaccattttgtaaacctgtttttagtaatatagatgatttttgtgtttttgactaaatttctacagttattcttgtccgtttgtccaatacaatcaaaaaagccccctcacgtatatgaggagacttttcgaattaatcttcatctagttcttgcagtttcttttgaaaaaagatcgcgcgtctgacacaaagaaaagctgctaataagaaaacacaatcaattcccatcatcagcatttttggagatgcttcgatgtgctggttcggtatgatcgtaccaatatataaaaaggtgctgacagcaagcaaaataaaagcgtactgcttgtaatctgtcactaaaccactccactttttcttcacttgaatcaccttcctgtttaacatgtctattgatagcttaacatagtaaaagaaaggtagtggcatgtaaatctatccattcactagtgcgtttagtccttgcttcatatcattcagtaaatcatccacatcttcaatcccaacggatatacgaattaaaccatcagtaatgccaagctcctcccggcggtctttcggaatggacgcatgagtcattcgagcaggaacagagattaagctttcaaccgctccaaggctttctgcgattgtaaacagcttaagctggcttaaaaacacatcgacatgttcttcttttccaatatcaaaagagatcattccaccgaagcctgatgcttgcgttttcgcaagttcatgtccagggtgagcaccaagacctgggtaataaacacgtgtgaccgctggatgttgttctagaaactcagcgattttctgcgcattttgttgatgtgcttccattcttagtccaagcgttttgatccctctcatgagaagccatgaatcctgcggtccaagaattccacctgtagaattttgaacaaaatgaagttcttctccaagctctttcgtcgctgttacaacaagcccgcctacgacatcactgtggccgcctaaatatttagtggcactatggaggacaatgtccgccccatattcaatcggtttttggaaataaggtgtaaaaaatgtattatcaacaatcattaagatgttggcttcttttgtcaattggccgatcgctttgagatcagtcattttcagtaaaggattggttggtgattcaatgtaaaccgcttttgtttcgggtaaaattgcttttttcaccgcttcaggatcacttgtgtccacaaaggtcgcatgaatgccaatacggtttagtacctttgtaatgacgcggtaagttccgccgtacacgtcatctgtcaggacaatatgatctccgctgttaaacagcatcatgactgccgtaatggcagccatccctgaaccgaatgcgtagccgtttgctcccccttcaagatcacgtatgatggtttcaagtgccgttcttgttggattcgctgttctagaatattcataccctgtatgttcgcctgctttcggctgcttataagtgctcacttggtatatcggaacagacacagcgcccgttttttcatcaccagttgttccgctgtgtatcatcattgtttttggtttcattctattttcctccctcataaattcctttgcttaaatagcgttcactgctgtcaggaaaaatggtgacaatgactgtcccaggtgctgccttctttgcttcctctaaagcggcatataatgcggcacctgaagagcttccaatgagaacgccttctttttcagcagcttctttcaccatttggaaagcatcatcatcactgaccgtgtaaatctcatcgaataaagcagattccatataatctgggataaattcaaggccgattccttccgttctatgcgggcccggatctcctccatttaaaatcgatccttcaggttcgacaacaattgtttttaacgccgggtgctgctcttttaaataggcagcacacccttgaaaagttcctccagaacccgctcctgctacgaatacatcgatgtttccttgtaggtcgaaccataactctgggccaagcgttttatagtaagtcaatggatttacttggtttttaaattgtaaaacgcaataggcattgtcaaggcttgcctctagttcaagggctcgatcaatcgcacccttcatgccctcttttcttggtgtatgaataatctctgcaccgagcgccttcattagctgttgtttttcttgactaaaatgttctggtacgcaaaaaatggtacgcaattgatgctttcttgcactgagggcaagcccaattcctgtgtttccagcagttgcttcaatgatggttccgcctgaacgcaatttgcctgatgccaatgcttctcttatgagcatatcacctaaacgatctttaatacttccacccggattcatcatttcaagctttgcatacacctctacaccatctgggatgccaatccctgacagctttaaaagcggtgtgcggccaattaattctgtaatatcctttatgacagccatatgattcccttcctttgtatggaaaagaagggggaacccccttctttattgagtttgctttatcatacgcaagacaaggtcagttgagtgaatcgctgcttgctcaagaaattgatcaaaggagacattggattctttccctgcaatatcagatagcgctcgaacgacaacaaatggcgttccaaagagctggcaaacttgtgcaacagctgcggcttccatttccaccgcatatagttctggaaacttctctctcacaaacgctacacgatccggatcattcataaacgaatctcctgttgcaattgttccttttgccacttgaatatgatcgatctctaaagccgattcctctgccagcttcacaagcttttcgtctgcagcgaaagcagctggcaaccctggtacttgtccgtattcgtaatcaaagattgtcacatccacatcatgatgtcgaacatcagtagaaatgacaatatcccctacatttaatgtgtgatggaaaccgccagcagatcctgtattgatcacataatccggctgaaagcggtcaagcagaagtgttgtgctgaccgctgcatttacttttccaatccctgattttaataaaatcacttctttatcttcataaacacctgttgtgaattcacacccagcgatgttttcttgtgtagcattctttagttgatctcttaatattgtcacttcttcttccattgcacctatgactgcgattttcaaatcaaaaacatcctttcattcccttttcttcgcttctacgatccaaacaaaatcattcatttgatgaaaggacgtgctaaaaccttcttcttcaaagatttgctttagcacatcaatggatggataatattccgtttctaaatcctcagcaagctgatcgaatcctgcggctttcgctttgtcgatttccgcttgatgtgctgcttgattttgaaacattgtatcagcaaagactattttaccatctgagtgaaggatgttgctataggtgtgaatggcttgttttttttcttcgtccgttaaatggtggaaagcatatgaactgacaatcgtatccggctcaaatggcggtgctggaaatgataaaaaatccccatcatgaaacacatcgggtactcccttttgaagagccgctttcttcatggcgtctgatggttcaacaccaaacacgttcttatcagctgcaagcagtgccactgttagattacccgtgccgcttccaaactcaaggacatattgacctgaacgttctacaatctcttttaaaatggccggataccggcgaaacacttcttcatactgctcgtcatgaccacttaccgtgtcgtcataagactcagcccaatgatcaaataaagaaagaaactcacgtcccattttctttccctccactttatctatttattcctatgcgtatagtatgctttaattcgtcgaacagttcttatcctaccacatcttctgtttctttcctactaaaaaatactgggaggggtagaaaaatatttgcccttttagaggagagagattaagatgaatggagagtatggaggagtgaatcaaatggattttcagttggattttctaaaggataaaattgaattctttgaagcatcgtctttaaaagaacttgaacaaaagatccaaaaacaaattgaacataatcaggcaatcttgctgactgttcattctgtcagtcatcaaacaactgtgattgatgaccggattttgtatacagcggttgttcattttaaggcgaatatctaaataaaaaagatagcatggctgctatctttttttcatgtttattttaatttttcaacctttacaggtttccagcctttttcatctacccatgtgatttccacgcggtagcgttcacctgatgatttgtcacggatggttccctttgcatcttgaggacctccgttatttcctaaccaaagaaccgtcatttgatcttctgaaatccccgtcgcataggacatggctttgatcatttctttccagtcttttgagttagaatcataggttgctgtatgtgaaccggattgctctgttcctacaggctcccagtcatcgctttcatatgttttgtctacgtcactcgttttgccgccgtctgtttctttggcgtcttttaacgcatctttattaggctcttcttcatcatctgtcttcttcgtatcgtcgtcttgatcagatgagtcctctttttttgcatctgaatcatcggatgtgtctttcttttgatctttcacatcttcttctgagttttgtttattttcacttgttgcaggcgccgtttttgatggttctttcgctacatctgtatctttcggtttattaaaaattaacaaactcgatgcgacaaccaaaataagcaccacaacgataccaattaatatgttaagcaccatattcgcctttctgcgcttatcacgatgttcaaatcgagaatttctactcaaaatctctgcactcctttgcctcgttccctaagtcgttactattctaacatgacatgaagggatgttctatgtctgtttcttttcaatttcattgaccttttttacaatatcataaaacgcatcatttgtcttagcccggccacttgcctcatcaaggtgaacaacgacaagagcatattttggtttttccaccggaaagtacccagcaaaccacttatgataaagcggattcccctttttatctttactgccggtttgggcagtgcctgatttccccgctacatcaaatggaagatcttgaaaccttcttcctgttcctttgtcagacgtcaccacctgccttaagtacttttgcagcttttgagctgtatagcggtcaatactgtctccttccggtcgtttgttttgaaaggttagcatcgttgttccgttttgatacagcactttttcagcgattttcacttcttttcgttctccgcctctcgcaatcgatgccatcatattggcgatttgcaaaggagtcgttttgacatttttttgtcctattgcggtttgggcaatggcttttttgacatgcttgtctcttttatctccccacacactgccggtttcttcacgatcaaactgtttgaaatgctgcttatgatagacatccccttcccagccagctcgatcaatgagtccaagctttgcagccgtcttttcgatgatttgatcatctgtttggataagcttgccagcaagtgtcgcaaaggtataattacagctctgcgaaaaactctcagacagattcagcacttcctgcgttccttctggctctccatataaattctttcgacagtcatacatcgtttgtggctggtcgaggtttttttcgattgctgcggcaagtacagcggttttaaagacagagcctggtgccatggcagtcagcatataatttcttgcctcatgccggtttttgcttgtgacatttggcgtactcgccatcgccaacacgctgctgctttcaatgtcgagcagaacggccccgcctttttcgacgtcttgttctttcagaactttctccatttcagcttgcatgttttcatcaattgttgtttgaacctgaagaggataaaatgaatgagcctctgctgtatatttgacgtccattccaaacaaagggtttccccttccgtccacatgatataacaattttgtgtcttgctcgggtaatagaaattcgtcaaaggtactttctagcccaaaagtaccgatttctgtacggatggaaagctcttttttgtcaggataacgctttctgagcaattctggattttcactcgtgaagcctaatgtgtggagggcaagtctttttttgtccttctctttcatatatacgccgtaaacacctgaatatttcatatcattgatgtctttcaacttttttttcgtgatgtcatctttgagaatcagaggttttttggtttctatcagctgttttttgagttcatcttcttccatctcaagaatagaggcagtttgttttaaatgaggaagatcatattgcagaaaaggaaataagataaccgcgggctgttcttttgtgagaagcgcttcgccgtttcgatctaaaaattcaccgcgaccatctgaaatgaccacttcttctgtacgctgtttgacactttcttgtattaaattgatatcaagctttgaaaaagattctgtgaaaaacagttgaatttctgccagtctcatgagaagaccgagcagcagcataaaaataatagcacctgtccattgaattctacgttttttgcgcataaaaacacctcgtccctattgtggacgaggtgtttatcgtataaacgtgattatgaaatttttacaatttggacgaacatttctccgccaggtgtttgaacggttactttgtcgtctacttgtttgcctaacagactttttgcgattggtgaatcgtttgaaatctttccttcgaacggatcagcttctgcacttccaacgattgtgtaagactcttcttctccgtctggtaattcaacgaaagtgactgttttaccaagtgagacaatatttgagtttccttcatcttcgataattttggcattgcgaatcatattatcaagcgttgtgatacggccttctacaaacgcttgctcttctttagcagaatcatattccgagttctcagagaggtctccaaagcttctagcaattttaatacgctctacaacctctttacgtttaaccgttttcaaatattcaagctcttcttctaatttacgttttccttcttctgtcattggaaatactttctcttgtgccatgaatcattcactccttctattaatcctcatcatacaaactttctgcacgtgagtgacgactgaaatatacaagaatgaggacttcttcaggccctcattccttctgtcccatatttgtaaaagtccatcttacatggcgtcccttttagatgcaactattatgccttttttcagacagaaccactctcagtggtctaaagatgatctatcttcatcgcacaaactgtggaaaggcacaggaagctcctgtacctcgttcgccatttcgatcatatgtagaagaatagcttatccattctccatcttccaatacataatatggtcagtgtacgatatgtctatgctatattattacaaaattgctttttgatcaagaattgtttgaaaatttgtgatgatttgtttgtcgtttttttaatatactattacaaaatcgaaacaacttcaatattcagcttgaaaacggcatttttctacatctatttcacatcattgttttcctatcataccaaatctttcattaaaggtgttccttctaaaaatatttaagcagcttctacttatagaaacaagtgaaatattggtatttattctctttatcatgatgttgaaaagacctttacaatgtaaaggtctttttcttctccaccatttactctgctcggttttgaagaatcgtttgaatttttgttaccattaggtcaatcgccacatggttttggccgccttctgggatgatgatatcggcgtatcgctttgtcggttcaatgaattgattatgcattggtctgacaacagatacatactgttcaatcacagaatcgattgaacggcctctttcttttgtatcgcgtaaaatgcggcgaatgatgcgaaggtctgcatctgtatcaacatacagtttaatatccattaagtctctcagacgttcatcttctagtgcaaagatgccttcaacgatgatgacatcctttggttcaacatggacagtctcttctgaacgtgtgtttagcttgaaatcatatattggtttttcaatggattcgtaccttaggagctgttccaaatgctcaaacatcaggtcattgtcgaatgcaagcggatgatcataattcgtaagcaagcgctcttcaaatggcatatgactttgatttttgtaatataaatcttgctgaagcatgaggatggaatgtcctttaaatttttcatagatcgaattggtgacgctcgttttacctgaacccgagccgccagcaattccaatgacaactggtttactcctcatgtgcctgttatttcccctttctcatcatgttgctagggtatactttttgatcgagcttgaattttacgatttgcagcggatgacgagcggcatctagttcatttcctttttcatcccaaatcgtctcaattttgcatgtgaaattctcaatttctggtccgaaaaattcgacttcatcgccagctttaaagaagttgcgctgctgcaatgtgacgatttgttctttttcatcataatgaagaacgagacctgcgaaatcaaatgtcgttttctttccatgaatgccaaacatttgttcatccgttcctggtacaccttcgaaaaaggctggcgctgtgtcacggtttgcgcatttatctagttcatctaaccattcctgctgaatgacaaaattgtccgggtcagcacaataggcgtcaatgactttgcgatatacactcacgacagttgccacataatgaattgatttcattcgcccttcgattttcaagctgtcaattcccatttcgatcatttgaggaatggattcgacaagctttaagtcttttggactcatcgcaaatggtgcgtcttcctctccaaacaatggcgcttcctcagaaccttctagtttataaagatcataatcccagcggcaggactggcagcagcctccgcggttagaatctcttgccgtcatgtggttactgagcacgcagcggccagagtaagcaatacacattgcaccgtgaatgaacgtttcaatttcaatatcgaccttttctttcatttctctaatttccagcgcacttgtctcgcgagcaagcaccacacgctcaagaccttcttccttccaaaactgaacagctttccaattcgaaagagattgctgtgtgcttaaatggacttcaagcttcggtgcgacacgtttacacgtttcaatgatcagcgggtcagccacaataatgcccgctactccagcgccttcaatcccttgaaggtattcctcaagtccgtccatgttttcgttgtgggcaaagatattcgttgtcacataaattcgtgcaccgtatttgtttgcaaatgcgacgccttcagccatttcttcaatggaaaagttatcggcatttgagcgaagtccaaattctttcccgccaataaagaccgcgtctgctccgtaatgtacagcaattttcagcttttccaagtttcctgctggtgcaagcagttctggtttttttgtaatgacacgttttccatcaatcatttcagaaataccatctttcaatagtgccatttcctctgcctcctcttatattaataaaccgtttctttaaagaagaatcctgtatcaatcgagcgattcactggttgaatctcttcaattcgcttcacccagtcctctttctgatcttcataggcgtctttgtcagccgctaataaatcaattgcttttctatatagtgacgtcacctctgtaatataagaaagtgactttaaaattccgtcaattttaaatgagtcaatgcctgcgtcaacaaattcttctaattcgtcaatcatacacacatcattaggactcataatatgtgtgccgtttgcatcctcgaaaatagggtatttgttttgacgttcctggtcatgaaggaatagtccttcctccatatttctgccttcaacgtccatttgtttgccttggtattcaaagtagttgccaatgagcgtacgtttcgattgaaacatacatgtcatgccatgaacttgaatttcgatttccacctcagcattttctttaatgtcgattacactgtccatgttcagctctttggcaagaacagcacgcgttgcgccttttctgccccagtagttacaagtgtaatagtttgtcccagtcgtttctgtactccagtggagattcaggctcaccccagtttcctttgcggccatgatcacggctgggtctccaaagacgacgccatctacgtttaatgcatcgagaaaggttaaataatctccaagcagctgcacacggtcattatgaaaaatcgcgttcatcgccacatacacttttttgtgatgcgcatgtgccagctcaaccgtctgtttcacatcttctcttgaaaactcgcctgcaagacgaataccgtatgtttgttcgcctatgaagaatgcatcagctcccgcctcgattaatggcagtacgtctgacaccttgcttggcgtcacaagcaattctggttttttcatgattggtcacctctttttgtactaatggcgatcccgtctccaactggaataatacacgtttggaaatcagggtttgacatgagccattgattgtatcgatcaatttttccaattaattgtttttttcgtttatcttcaatttcttcttcatagttcgttgccactaagcctttgaataatacgttgtctgttatgatcattccgtcatgagcaagcatcggttcaaacagctcaaaaaaacgtttgtactgcccttttgcggcatcaataaagatcacgtcatagggcgccatcgtttggaccgttttagccgattccatggcatcaccaaagaacacgtgtattctttcttttaactttaattcctcaatgttccgtgtcgcttcttcatagcgtttcgcatttcgctcaatcgtataaatctcagcatctggcagagttgtcgccattcgaatggcggagtagccaatcgctgtcccaacctcaagaattttcttcggctttttcatcgacagcagctgcagtaaaagctcgatgctcaccttttccataattggcacatgatgctcttttgcgtatacctctaattgagcgattgcatcaggacttgggtgaattaaatgttcaatataatcattgatttgatcatcttcgatagtcattatttgtctagctccttcatgacctgaaaaagaagagtcctgcctattgcagctctctttctcgtcaatctttcgttcatctaagtaaaaacaacccgatatattttaccacaaagaagtggtaattgcgaacctataaaatggatatttcaacgaaaaaaactgcaggcaatcttgtattgtctacagtctttttcgattcacatgtacattaattactgcctgtgatgtattttgctttcgctttgttgtgctcatttaacgttttcgtaaagacgacttctccatttttcttcgcaaggaaatacacataatccgttttctctggatgcagtgccgctttccatgaagattcaccagcatttgcaataggtccaggcggcagccccttgttattatacgtattataaggagatttcaccttaaggtctttgtaataaacgcgcgatttatgctcacccagtgcataaagaacggttgggtcggtttgaagcggcatgtcctttttcaaccggttataaaatacactggagatttttgctcgatccgtcttttccgtcgcttccatttcaatcagtgatgccatcgttaacacatcatgtatggacatgtttgtctttttcatgtctttttcatacgttttcacgtattgatctgtttgtttaatcattgtttcaatgatcgtttcgagtgattcatcctcgcgataaaatggatacgtcgcagggaataaataaccttctaacggatgtttcacctgtttgccatttacctgtgatgtcaccgttttcggatattttttcattaacgtttgaataaacgcaggatcatcaagctttgcttccacttccttggctgaaaaatgcgtctggtttgcaataatcgccgcaatatcagacagctgttttccttctggaatcacaagctgaaaggcgtagtctgtccctccagatgtcagcttttgaatcagcttgtctgcgtccatcgtttgttttaaatgaaaataccctgctttaaatccggacgcatttttgtattttgcataataagtgaaaatcgtgtcattcgaaatgagcccattttcttttaaaatgcccgcaatctcacggacagatgtcccatttggaatatgaatattaatcgtttgtttgcttttttgatcgaccggtccaagtgctgatttaacatataaaaagcctgataatgctgcaatgatgatgacagcaagaacagataacaggacgatccccatttttcttttaaaaaatggtcgtttcttttgttctgaaaacatgcatggccctcctcacatctagcttttatagtacatgattcgacggagttcggcaattacttgctcatgcatctcatgacagaacttgacataatacggctaaaccaacgccgccaccgcttccaatagcagccatgacatagcttccatttggtaaagcgcgtgcttcgtaaaatagtctcaccatcatagcagctcccgatgcgctgtatggatgaccaagacaaagtgcaccgcctcttttattgatccggtcataaggaataccaagcgtacgagcaatcaacgctattttcagagcaaaggcttcattgatttcaaacagcgctacatcctctgccttaattttctcttgatctagaagtttcttgatcgcatcaatcggcgcagcagctggaaaatgtggatgcatcgccgtcacagcacttccagcatatcgcagcatcggctgaaaatcattcgcctccgctaacgctctttccatcacaacgaccgctgctgccccgtctgcttctttgcagctattggcggcagtcacagttccttttcccggtgaaaatacaggctttgcccgctggatcagcttctccatcggtcttattttagcggccgcttcatcaatgctcagtccgctaatcgaaacaatttcctctgaatatgtaccacgtttgattgagtctatacttctttcccagcttaattgcgcataatcatcttgttcttttcttgtcacagaaaatctcgaggcggtcagctctgctgcttcgcccatagccggatctcctatccattcaggtgaaaagcgggctctttctttcattggtgatctggaaatgctctcagtcccgccagcgatatacattgagccttcccctgattgaaccatgacgcaagctgttcggattgcttcaagaccagaggcacactgcctatcaatcgtcataccaggaacgtgcaaagaaagccctgcttctaatgaggacagacgggccatatttccgccgcctcctacaacattgcctaatatgacgtcgtccggcgtcatcccttgagacaaatgctgaataaggggcgcggctaattgctctggacgataatcattcagcatcccgtttttatcaccgaagggtgtccgttttgcttgtacgattactgcttgcatgacaactgctcctccgcccactttttcatgctggcacgtgctaatttccccccagatgtttcaatcatttgatcaatgacaagccattttttaggcatcttgtaggcagccaatttttctttgacagcttgccgaaccgtctttgtctgctgtccttcttcaataatggcaacaggaatttcaccccaatatgggtcaggaacgccaaccacaatcgaccgcttcacctcgggctgttcatttagcacgcgttcaatttcctccggaaaaatattcagccccccatagacgatcatgccattctcacggccgctcatatacaaatagccgtcttcatccatccagcccatatcataaactgtcagccactcctccggcggtttcacctcatgtaagtagcctgaaaaagacattgggctcttcacataaattcttcctgtctcatttggctggcagacagattgatcggcccgcctcacttcgacttgaatggaagaaaagggtcgtccgacagaagaaggtttttgcagaaagtcatttgaagataagtaggaaacaaagcttaactctgatgtgccgtaaaaatcaaaaaaagtgacatgcggatagttggtgacaagttgtttttttgatgagatgccccaatctgctccggatgatatgacaagaagcgggttgtctccctcaaaagcattaatttgcagtaacgattctgtcattgtcgggacagtatacataagagtgatgtctcctgtctctaaagctttctttgctttcactggcgtgaatttttctaaaagcgtcactgtgccgccaaagtatagggtactgatggcaccatataaaaagtgagaggataagagtgtgcctgctataagaacatgatcttgatgagtgattccaaatgtatccgctgtcgttcgaaagctttcgatccatgactgctgacgcctgataaaggctttaggtgaacccgttgatcctgacgtaaatcccatataaaagacagggtcgttctcgctgtcgcttttgttatatggaccttgtgtgatcaggctcattctttccttccattcagataaagaaaaaaccggcatgtctacgctgtgtttttcaaatcttttcatatatcgatcctctataataacgagagctgcctcacttaacaagagcttttctacacattcctcatggccccatctcggatcaagcgggatagctgtccaccctgcacaagcagcgccagcaaatatttgcaagaaagaagcaccatttgataataaaaaagcgactcttttttgctcatgagccgttcgttgcagccattgtgccgatgtctggacacgttcataccaatcttgataagtgatcctttcttttccatcaatgatagcgatatgatctgggttcatttctgcatgtaatgcatagctatccgttattctgttcaaaccgcacgcctccctttatgcacatccctttttcgatatgacatggcctcaatgattttcaccgtgagaacggcacacatgcccgctttgatgagatcacctggaatataaatcagactaagaagagctgcctgagtgacctttatatccatcatcatggcttgaaaaggaataccgcatagatataaaatcccgatactgcataccgcatagatcataaaaagacgcagagcggttacttttttcagacggttcagccacaaactgatcataagggcagccactggataagctaataaaaaacccccgcttggtccaaaaaagacccctattccgcctctcccaccagacaaaagaggtgcgcctgctgccacaaccaagaggaacagaagtaaactgatcagtgcctgttttggctttaacagccccccagcaagcaaaagacctgccgtttgcaatgtgattggtacaggtgtaaacgtaagtaaaatcggcgggatcaaccctaacattccgataaccgctgtcattaacgccatttgcatcatgtcttgaattttcaatattcatacccctcactcaattcattgttaaaaatagagtaaaaggtacagtttattatgtcaacataaaataaaataaagttaacatattgatcgtaaaaaaagacctgtgaagaaagatcaccaagatccgttcacaggccttttattcgttctattcttcgtcttcttcttgatctaagaacgtatttaacgtttcttcaatcatgtcccactcttcatccgtttcaataggctctagctcgccatcttcaccgtcttcgttcggcgtgaagcttgatgcatgaatttcaatttcttcattgtcttgctcagaaattgggtagtaaagaacatatgatttgttaaaatggtcgctttcaaaagtaaatagtacttcgcaaagctgttcatttccattatcatcaacgattgtaatttgcttttctccgtgttccatttgattcacctcattttaatttaagctgtctaaatacccttgcaggatcataacagccgccattttatcaatgacttttttacgcttttgtctgctcacatctgcagagatgagcattttttccgctgccattgtcgacagacgctcgtcccaaagcacaacaggaacattgtacgtgttttctaacactttcgcaaataattggctggcttcgcctctaggaccgaccgtaccgttcatattttttggaaagccaagtacgattttatccgttccgtattgcgcgacgatctcagacaggcggctgagaccgaagtctccgcctgcttcatcaattttaattgtttctatcccttgcgctgtccatcccatttcatcactgatcgcaacaccaagggttttcgtgcctaaatccaagcctaaaattctcatgttttacgcctctttatgtgtctctaagtacgatttaaccaattcctcaattaattcgtctcgttctagtttacgaattaggttgcgtgcatcctgatgtcttggaatataagcagggtcgcctgacagcaagtatccgacaatttgattgatcgggttgtatcctttttcttggagtgcgtcatatactgtaatgagcacttcattcacattggtttcagctgaatcatcagagaagttaaacttcattgtcttatcaaatgaactcactgcttcttgcacctctcttccaacattctactagcaagcttttttctaaccgctcatctaataccattattctacactacatcgcctgattataaaacggatttgacagattcttcgacagttgccagtgcttcttctagcttttccggttgtttaccgcctgcttgtgccatgtctggacgtccgcctccgcctccgccgcagatttcagctgcctgctttacaagtttccctgcatgcagacctttttcgatgacgtcttttgtcactcctgctgaaatgtttacttttccgttttgaacggctccgagcacaatgacagctgatcctaatttggcttttaagtcatcaaccattgttcttaaatggttcatgtctttcgcgtttactttttcagttaacactttcactccgccgatttctgtcactttctctaaaatagagcctgcttcagcctggcttaattttgcaagaagagattcgttttctctttgagcctcttttaaatctgcctgcaatgcggcgatacgttttggtacgtctttcgtatttgacttcagctcacttgctgcctgttctaaaatggccagctggtcatttaattcttcgtatgcacctttaccagtcacagcctcaatccggcgtgttccagcaccaatacccgattcagacgcaattttaaacaacccgatttccgccgtgttttgcacgtgacagccgccgcatagctcgatgctgtaatcgcctacctggaccacgcggacaatatcgccatacttctcgccaaagagcgccattgcacccatttcttttgcttcagcaatcggcttcaggtcaatcgcaacagagatgccttcccagattttttcgttcacgattttttcaatctgagacaattcttcttttgtcacttgtccaaagtgagagaagtcaaagcgaagtctgttttcattcaccaatgatcccgcttggttcacgtggctgcccaatacatcttttagcgcctgatgcaaaagatgtgtcgctgtatggtttttcacaatgccttttcgaagagctgattccacttttgcagtgacttcaagtccttttttggctgtaccgcttacaaccactccctcatggacatgctgaccgtttggcgcctttttcacatctttaatgtcgatgatgacttcagcgctttttaatgttcctttatcagccacttgtccgccgctttccgcatagaaaggtgtttcatctaacaagatttgtaccgtatcgccttcatgtgcttctgtgacaatttcaccattttgaagcaattcgacaatatgggcatctgccgttagattttcgtagccaacgaatgtactttctactttaatatctcctagagcgccgccttgaacctgcatactgccgacatcttgtctcgcatttcttgcgcgttcacgctgcttctccatctcagcctggaagccttctcgatccactgtcatgttctcatcttctgcgtattcttctgtcagctcaacagggaatccatacgtgtcatacagtttaaagacatcttcacctgaaatctgcgtgttgcctttgtctctttcttttttgatgacttctgacaagatggctaacccttcgttcagtgtttcatggaaacgttcttcttcatttttgatgactttcgcaataaattcttcttttgcttgtacatctgggtagaaatccttcatgatttccgccacaactggaactaggtcaaacataaacgggcgatggatgtgaatggtttttgcataacgcactgcacggcgaagcaaacgtcttaacacataccctcggccttcattggaaggaagcgctccatcacttacagcaaaggcaaccgtccggatgtggtcagcaatgactttgaatgctgtatccttttcctttgtctcgccataactttctccagaaatggtctcaactgcacgaataatcggcatgaatagatctgtatcaaagttcgttggcacgttttgaatgacggataccattcgttcaagacccatccctgtatcaatgtttttcttcggcagcggcgtgtatgacccatctggattatggttaaattcagagaacacaaggttccacacttctagataacgctcattttctccgccaggatataattctggatcgttcatgtcgtcaccgtatgattcgccgcggtcatagaaaatttccgtattcggtccacttgggccctcgccaatatcccagaagtttccttcaagacgaataatacgttcttcaggaacaccgattttatctctccatagaacatacgcctcttcgtcctctggatggacagttacagataacaaattcgggttaaagccaatccactcgtcacttgtgaggaattcccacgcccattcaatcgcttcttctttaaaataatcaccaatagagaagttgccgagcatttcaaagaacgtatgatggcgtgctgtctttcctacattttcaatatcatttgtacgaattgatttttgcgcgttgcaaatacgcggattttcaggtacgacgcggccatcaaagtatttctttaatgttgccacgccgctgttaatccacaaaagtgtcggatcgtcatgcggtacgagtgacgcactcggttctacagcatgtcctttttctttaaaaaagtctaaaaacatttggcgtacttgagctgaagttaaagttttcattcaaaaatcctcccttatcattcatcaatctccacacaaacgaaaaaacatcccgccctatgcaagcacaaaacgacttacacagggacgagatgctctcgcggtaccaccctgattatagacctattcgtctatcaccttcacatccgataacgccggaagagagcggcagtgtttatctgcactcgggactagcttccgttaaaggtctgataaggcttttctcagcaaaataaagcctctctctgcaacagctttttaacgtactcgggtccgtcattgaattcagtatgtatgaatcgaaattattatagacaactcggctcctcttgtcaatgaacgcttcgtctcatgaggatatattgcacaatgatcaccctgattatagcagctgtaggtaccgctaaaatcatcccaattaagccaaataactctcctcctgcgagcaaaacaagcataatgacgacaggatgcatatgaagactcctcccaacgatgatcgggctgaggacgttgctttctaaaaattgcagcactgctactgtaatcagcacaataataaccgatttgaccgagatggtaaacgcgataaagacagcgggaatcgcgccaataatcggtccaaaatacggaatgacattcgttgcgccaatcagcatacctaggacaagcggatacgggatatgaaacagccagagcacaatggctgctgcaccgccgattaaggaacagacaagcagctgccctctaatataattaccaagcgattcatcaactgctttcacaaacgcatgccccctctttcgaaatgagggcggcgttaaataccatgcagcccgcttcatcgtattcatgtccttcaccatataaaaaacaagaaaaggaatgagcgctgcaactaatgcgtaatcaagtaatactttacagctaagaatcatccgctcagcgccgttagctgcatatgtctccgattgaacaatcaaacggtccagcctgtcgtgaagtccgtcgggccaatggctagtatgacgatgaatatgagataaggcgccattatacgtttcggcaagcacaggaatttgctctgacagctcatttaactgcttaatcatgacaggtgcccctttataaaccgcaagcccaatcccgccaaaaaacagtacataaatcaataagagactaacagtccttggtaagccccccgcgtgcaatctttccactatcggataaagcagataagaaataaaaatagcaatgagaagcggaatcagaaccgcctttaacaacaaaaaaataggcatccataactcgtcgagctgcagtaaaatgagcaaggatgcaaggacaagcaggacccctgcagcatataacagaaattggatcggacgtttcttcacctttttcacctcttttcttattgtttaaccttcttctgcaattatccatgtaaataaaatttgtcctaactttgttaaaaatgaatacacatgaaacatacagctccatcaaaagtcactaaaatatgtccactgaatattccatcatgtacaagaggaggtttttcatgatcacattcgaagaagtcaacaagcattatggccagttccatgtacttaaggacattaacctacatattcaaaaaggtgaggtggtcgtgatcatcggtccttcaggatcaggtaaaagcacgatgctcagatgcatcaatcgtcttgaaagcattgatgagggaaaggtactcgtcaaccaagtgcctgttcagcatccgaagaccaacattaatcttgtcaggcaaaatatcgggatggtgtttcagcattttcatctctatcctcataaaacggtgcttgaaaatattatgcttgcgccaatgaaggtgaaaaaggtgagcaaggaagaagcgagggaaacagccgaattttatttacataaagtcggcattcctgataaggctgacgcctacccttcaagactctcaggcggacagcagcagcgtgttgccattgcaagagggcttgcgatgaagccagaggtcatgctgttcgacgaaccgacttcggcactcgacccagagatgattggagaggtactagatgtgatgaagcagctcgcccgagaaggaatgaccatggttgtcgtcacacatgagatggggtttgccagggaagtggccgaccgcattgtctttattgatgaaggcagagttcttgaagagtcaacaccggctgcattttatgagaaaccgcgtgagaaacgcgctcagctctttttaagccgtattttaaatcactagggggaaagatttgatgaaaaaaatgaaacgctttggcctactactctttatgacttgctgtattgccgctttagctgcttgcggctctgctgaaaaaggctcgacgaatgcaaagcaaggaagctctttagaagccattcagaaagacaaaaaaatcatattcggggtcaagaatgatacacgtctcttcggtctaaaaaatcctagcagcggagatatcgaaggatttgatatcgatatagcaaaagccatcgcaaaggaaatgctcggtgatgaaggaaaagcagaattcaaagaagtgacatcgaaaacgagaattcctttactgcaaaaaggagatattcatgcgatcgtcgcaaccatgacgattaccgaagagcgtaaaaaagaagtcaatttctcagatgtttactttgaagcaggacaatcactgcttgtgaaaaaaggaagcgacattcaatcgattgatgatcttaaaaaagggacgaaagtgcttgcagtgaaaggatctacttcttctcaaaatatccgcgaaaaagcacctgaagcgtctgtattagaatttgagaactatcaggaagcttttacagctttaaaatcaaaccaagggcaagtgctgacaactgataatgcgatcttatttggtatggcagatgaggattcaaattacgaagtcgtcggcggcacctttacagatgagccttatggcattgctgtaaagaaaggggatcaggaattaacaactgcgatcaataaagccctaaaaaccttaaaagacaatggagagtatgacaagattcatcaaaaatggatcaaagaataaccgtttgacttgttaagacctattatcttagggtgagccgctcattggctcccctgttggtcaggaaggaagtgaactgattgctgcggttttccattctcactgaaaacttcaatctttatgtagaaggctttaaatataccattggtgcaagtgtcattgctttgattggaagctttttgatcggtacactcattgccattatgagaattgcgccactcaggccgctcaactggttaggaacggcttatgtggaatttattcggaatattccgttattattgatcacattcgttttcttctttggtttacccgtgctaggtattgtagcagatggcttcaccgctggcaccattgcccttgccatttatacgtctgcctttattgctgaagccattcgcgcagggatacaagctgtaccgcttggacaaatggaagccgcccgcgcttcaggtctatcctatggcgggacgatgcggtatatcattctgccgcaagcgattaaaattgtcattccccctcttgggaatcaatttattaaccttgtcaaaaactcctctattttaggtgtcattgcagggtttgatctcatgtatcaaggagacctcatcgcttctagaacatttgtgacatttgatgtctacatctttgttgccatgttctatctgctattaacgattccgctcagtataggcgttggttatttagaaaaaagattagcaagaagccactagaaaggaggaaacaccatggattttctaggtgcctaccagcctgatcatctcgcctttttacttgaaggatttgctgtcaccttaaaagtggcttttatctccatcattttgagctttctcattggattagtcattggcacattgcggttcgctcaaattccggttttatcaaagatacttgcagtcgtcgtagaaaccattcgaaacctgccgctcttattgatcatcttttttacgtattttgcactgcccgaaatcggcattaagctgagcattacagcctcggctattgcagctttaaccgtatttgaatcagcgatgctgtcagaaattattcgaagcggtttaaaatcaattgataaggggcagatcgaagcagccaggtcttctggtttaacctatattcaaacgttaaaaatgattattatgccgcaggctttacgccgtatggtgccgccaattgtcagtcaattcatctctcttttaaaagatacgtcgcttgctgttgtcattgcacttccagaactattgcatcacgctcaaatattaaacggtcagagccaatcttacttactgcccatcttcctattagcggcgatgatgtattttgtcgtcaatttcagcttatcactacttgcacgccgattagaatacaggcaggcgtaaaaaaggacatccgcttttggcggatgcctttttgtttacatcattctcataacacgttttcttagctttttcatatcccgctttgatggcatatcatatcgacttgcaaagtgatatgcgagtgcacctgcaccaagcgttaatagtgaagaagtcattttgcccattcgaaattcccccttaacacttatagttgaattgaacgttcatcatcactaaacagatcatctaagctgcttagtgtcccgtcttcttccacttggtgtgtagatattttgccttttgacagcgtcaattcaataaaacagccccagcaataatattgattgaccccaatttttccgatgtctttacatttgcaatttgggcaaatgagcataatcagcacctctttacgttcggtttagaacaagtgcttccttttgaacgttgatcaaggttccggcagcctgcagctgttttcgaatccctgatagctctgtaaagaagccgtccgagagttcatatgctacgattgtgcccgaatttgtgcaaaagtatacatcttccaaaatgcctaaattttcaccctcaggtgactgcatcattttctttttcaatttcgaaaataagaaggatggggcagaggaatccatgcctactccctcctggcagctcacatataagcctttgtctgtcagctgatcaccagcagagaatggaatgagtgcacagtctttctttttcccatctaacacatatcctccgcagctgcctccggctaataagcaaatatctttaatggaaccaagtgaatgagacagctcacctgtatagattgacattccttcaagctctcgacatgttctcaaaatgtgctcaaccaccttttgcggaacagtcttatcgtgtgcgtttgcttcgatactcatacgaagaaatggcttccatgaacgtaatatgaggatttcttttcacgctaaaaaggctcccgtatggaagccttttattcatgcataaaatcaaacggagtgattccctccatgccaatatttgcgtcatgtacgctaaacggaagctctttttggagcgctgcaagctccgcatccataacttcatcagtttgcatcagccgcatcgttaaggacgtttgtctgagcgaatcctcattgtttttcacaccccactccagcgctgattcctcgccgcacaggattaaaaactttttacttcgtgtaatagctgtgtacagcagatttcgccgcagcattctgtagtagcttctcacgactggcagcacaacgattgggaattcactgccttgtgatttgtggatggagcagcaataggcatgtgtaaattgatgaaaatccttttttgtaaaggtgatttcattcccatcaaaggagatcacagccatgtcttctttttccgtgttttctttcgcataaaaaatcgagacaatttcgccgatatcaccgttaaaaatattattttccggctgattcacaagctgaagcactttatcaccggtccggtacaccacatcaccaaacgggatttctctgccctttggtttttttggattcaaaatgtgctgcagcattttattgagctcattaatgcctgctttccctttatacattggcgcaagcacttgaatgtcttttgctgaatagcctttttgagcagcattgctgacgactttctcaatcacttctttcatttgatcagctgagcattttatgaaagatcgatcctttgaacgtgcggtaatatcttttggcaggacgccatttttcatatcatgtgcaagttcaacaatgctggagccgtctgcctgccggtaaatatctgtcagtgtaacagctggtacggcttgtgaggcaagtaaatcccttaacacttggcctggtccgacagatggaagctgatgttcatctcctaccatgatcacttggatatgatcaggaatcgctttaaacaagtgattcgcaagccaaatatccagcatacttgattcatcaatgatgacaagctttccttcaatcggctgttcctcatcatgcgaaaagccctctgatccgttccagccgagcaaacggtgaatggttacagctggaagccctgttgattctgtcatccgtttagctgctcgtccagttggcgccgcaagcacaaatggaaaggattcatcttttttgtaatcactcggatcaagagatacaccgtgaagatcgctgtaaagctcaacaatccctttaatgaccgttgtcttcccagtcccaggtccgcctgttaaaagcagcatcggggacatgagtgccttttgaatcgcttccttttgtgtcggcgcatactggacgcccagccgttcctcgagctcgccaagtgcgagcaggaattctgattcagggaattgatctgcatattccgtttgggagacgattttttgtattcgtttggcgacactttgctccgcataaaataaggacggatgatagcagcgctcatcttcaatgatcatctctttcccttcgccaagtgcaatgatctgattggcgacatccatttccgtcactttgtactcattgcctgtctgattgagcagcttgcgggtttcaacgatcaaatctttcgtttgtatgtacgtatgaccgtcctgaagacttgctgtttcgactgtataaagcagggctgcacggattcgctctgggtcatttcctgagatgccggttctagcgccaagctcatccgccttaataaatccgatcccttcgacatccttgacgagctgatacgggttttcctcaatcttttgcagcgtttcactctcgtacacttggtatatcttcatgctgagctgaggaccaaagccatattgattcaggctgatcatgatttgttccaatccttgatgttcctggagcgctgcagccagcttatctgccttcttttttgataagcgcggaacatcatacaaaacagctgggtcacgcataattttatgaagcgtctggttgccaagctgccccacaatttcttccgccgtctttttccctatcccctcaaataaatcacttgagagataatgaatgattccttgcttcgttgtcggtacttccttttgaaaatgagtggcctgaaactgttcaccaaatttcggatggcttgtgactttgccatagaaggtgtaagtttcttcctcatgaagtgctgggaagtagcctgtgacagatgctgttttttcctctaagttttccgatgtttcaatgactttcacctttaacaccgagtataaattactttcattatggaaaataacggcttgaactgtcccctttaaaaacggttcgtcctcaagcttcatttgatctggatgttcctgcacaggtcttccctccttccgtctattctgcctcttgaatcagcttttgcgcatgtagtgccagcatatggtcaggctgcacgtcaatggcttttcctagcatctcaagtgcttcgtcttttttctctaagtatgcatacgcaacccctaaattataaaaggcatctgcatgctgcggatcacgcgcgaccacctcggtaaaggttgtcaccgcttcttccagcaattgttcattggctaagcacatgccaaattggaatcttgcttcattatcttcttcattcagttcgatggcacgctgaagatagggcatcgcaagcttcggctgctctaatttgatgagcgtctgccccagcatataaaataaatcactattttccatgccagcttgtagtgcttgttcaaaatagtcttttgctttcataaagtcttcttttaatgtgtatacatttcctgccccgtaataggctgcagctgcggcgtgatcaagttcaatggctttttgaaagaagtttaacgcacgttcaaattcattgatgcttgaaagcaagttcgcaaaattaatatatggaaccgggtcttttgggctttcttcaatggctttcgtaaaagcttcagctgctttttcgatgttgccttgatttaaggcttctatgccaatttcgttatgattcattcgctctctcatcctttcattaaaaaacctcaacagcgacgttgaggttttgaaaacatgttacacatacgacagcttttgaccgtccttaaaaacatcgtcaattgttccgccgccaaggcattcgtcgccatcataaaagacaaccgcttgtcctggagtcacagcacgaacgggttcatcaaagatgaccatcgcttcttgctcacctgtcattttgaccttcacatggtgatcttcttgacggtatctgaatttggctgtgcatgttaattcaccattttcgtcgacaatatgaggacgagtccagctgatattgacggctgaaatgctttcagaatataaaagtggattgtggaaaccttgttcaacaaacaagatattttgtttcaagtcttttccaacgacaaaccaaggatcaccgctgccgccaatgccaagaccttggcgttgaccgatcgtgtaatacatcagtccatcatgttcacctttgacttctccgtccattgtctgcatcacgccaggctgcgcaggcaaatattgactgaggaatgttttaaagtttctttccccaataaagcaaatacccgttgaatcttttttcgttgctgttgcgagctctgcttcttttgccaattcacgaacccttttcttctctaaatctccgattgggaacatgactttatcaagctgttcctgagtcagctgattcaagaaatacgtttggtctttgttggcatcaagaccccttagcattttgacttcatcgccagttctgtcgacgcgcgcatagtggcctgttgctaaataatctgcaccgagtgacaatgcatgctcgaggaacgctttgaacttaatttctttgttacacatgacatctgggtttggcgttctgcccgctttatattcatcaaggaaatattgaaacactttgtcccaatattgcttctcgaaattcaccgcataataagggattccaatttggttacacacgcggatgacatcctcatagtcctccgttgctgtacatacaccattttcatctgtgtcatcccagtttttcataaatatgccgattacatcatagccttgctcctttaacataagagcagcaactgatgaatcgactcctccggacataccgaccacaactcttgtgtcttctggtctttttgtcatcttcatcaactccattttcaatgaaacagcatgtgcgtttcgttcttcaggtgcctggctgtttcatttttcacacacgaacaaaagaggaacgtttatttggctaagcgtttgacaacagctgctatcttgcgtgccgcctgtttcacatgatcctcttcattcccaagaccgaagcttattctgactgaggacgtcagcttgtctgcttcttcgccatacatggcgcttaacacgtgcgaaggaaggacggatccagccgtacatgcagatccacttgaaacagcaattccttccatatctaaattcacaagtaacgattcgatggaaacgcccgggaaatgaacatttaatatatgaggcaatgtctctttcgggtgcccattgatagagaaagtaagtgattcctcttcgaatacttgcagcatgatttctttgagcttaccataatgcatggctttttctcttctattttgcttcgttaattgaacagcctctgcaagtcccacgatccctgccacattttcagtgccagcacggcgttttctttcttgttctcctccgaatatttgcggagaaagtttcacgccttcgtttacatataaaaagcctgttcccattggaccatttagcttatggccagaagcagataagagatcaatatgaaggtctgctacatcaataggcattgttccaaacgcctgcacggcgtctgtatgaaaatgagcagtgtgattgtgtaaaagctcgccaatgtctttgattggctgaatcacacctgtttcattattgccgtacatgatggtcacaagaatcgtatcatctctcagtgcttgttttagttgttcaagatgaatcaatccagtttcatccacatctaaatatgtcacgtcaaatcctagcttctctaggcgttcacatgtgtgcagcaccgcatgatgctctgtttttgctgtgatgatatgttttccttcatgctgtcttgccatggccacacctgtaatcgccaggttgtccgcctctgtccccccgcttgtgaggatgatctcctgcggtttacagtgtaattctcctgcaatcacttctcttgcttcatcgagccactttcttgcctcgcgcccatatgaatgaatactagagggattgccaaatatctctgtaaagtaaggcatcatcttgtccacaatacgctgatccatcggcgttgtggccgcatgatctaaatagattcgttccatttccggtacacctctgatctaaatatagaacatatacgcgtcttgattcccgtcatctgtatagcttgccaagtcttcaagagttgtattgtctagtacgtcttttactgcatcacgaatcctaatccaaagttcacgctttgctggttcttcgttttcgatgacttcgacaggactaatcggtccttctaatacacgaataatatcaccggctgtgatctcgtttggttcatgtgcaagaacatagccgccatatgcaccgcgaatacttttcacaagacgggcattacgaagtggtgagacaagctgctctaaataatgctcagacaaattattgttttgagcgattgattttaatgatgtggggccttcgccatgttttttggctaattcgatcatgatcgtcagaccatatctgcctttagttgaaattttcaagttaaacacctctgcgttttctattctatgtcatcaattatttttctgatttcatatacgctgatatatagaccaaaagcaattatatcatactttcagccaactttcatttgccggttctgagcgcttgaggaggacgcatcccttttctatttgaagaaatttcggtactctatacaaacaagacattgctttaggagagataatcatgaaacctttagcgtaccggatgcgcccaagtcatattgaagacatcattgggcaggagcatctcgttggagaaggtcaaattattagacgaatggtcgaggcaaaacatttatcctcgatgattttatacggaccgccgggcatcggcaaaacatcgattgcgaccgcgatcgctggcagtacaagcattgcgtttcggacattgaatgcagtcattcataacaaaaaggatatggaagctgtcgccgctgaagcgaaaatgagcggccaagtcatccttattttagacgaggttcacaggcttgataaaggaaagcaggatttccttcttccttatttagaaaatggcatgatcattttaattggcgcaacgacggctaacccctatcatgcgatcaaccctgccatccgaagccggacacaaatatttgagctgaaaccgcttgaaacagagcaaatcaaggctgcgttaacaagagcgttacaggatgaacatcgcgggcttggcggttatgaggtgacagtgaacgatgaagcgatgaatcattttgccaatggatgcggcggagacgtacgctctgctttaaatgcgctagaactagctgtcttatcgacaaaagcagatgaggccgggcatattatgatcactcttgccgcagcagaagaatgtttacaaaaaaagagcttctcacatgataagaatggtgatgctcattatgatgtcctctcggcttttcaaaaatccattagaggatctgacgcagatgcggcgctgcattaccttgccagactgattgaagcaggagaccttgaaagcatttcaaggagattactcgtgatggcttacgaagatattggtttagctagtccgcaggcaggtcctcgtgtgttaagcgctgttcaaacagcagaaagagtcggcttcccggaagcacgaatcccgctggctaacgcagtcattgaactgtgtctttctcctaagtccaactcagcatataaggcggttgatgcggcactgggtgacattcgatcagggaaaattggtgaaatccctgttcatttaaaggatgctcactacaaaggagctacagcactcggcagaggtgtcgattacttatacccacacgattatgaaaacggctgggtgaagcagcaatacttacctgatccgctgaaaaacaagcaatactatgaaccgaagcaaacaggcaaatttgaaggcgcactgaaacaggtatatgagaatttaaaacgtcaaaaataaaaaaagccccctgcatgttagcaggcgggctgtttatttatccttcacacgtgtaattggaatatcttttaagagctgcataatgacatgaccacccatgatcagccctgcaacagacgggacgaacgcattggatgatggcggcatttgtgcctttcgaatcttcgcttcatcatttccaacttcttttctgacatcttcgcgaatcacaatcggactttcatcagagaaaatgacttcaattcctttacgaatcccttctttgcgcagacgcgttcttacaacttttgcaattggatcggtatgtgtttttgaaatgtcatcaattttgaaacgggtcggatctgttttgtttgctgctcccatactcgaaatgatgttcacattgcgtttcagacactctttcattaaatgaattttatagtgaatcgtatctgacgcatcgatcacataatcaagcggatattcaaaaaattgctcatatgtttcctctgtataaaacatctttagtgcaactacttcacattccggattaatatcagcgattctcgcctgcattaagtcaacctttggctgaccaactgttgaaagcaatgctggaagctgacggttcacatttgtaatatcaatatcatctttatcaacaagaacaatacggccaacgcctgaacgagcgagtgcctcaactgcaaatgagccaacgccgcccacaccaagcactgcaactgtactgttttttaatatatctaagccttccttgcctatagcaagctcgtttcttgaaaactgatgtaacaagtgcctcactccacctttatttaaaatgaatcgaaagaatcatatcatattcaaacttcttcgtcatccttctgaaaaagaaaaaaacacaaaaaagtcccgacaacgccgccagcttttccttcgttttgaaccccgcaccatgcaggtgggtgctttcttcctgactttataagtcctctaaagaggcatttatgcagaaaggaaaggcaagctcccgtataaaaaaatgttcggtcaaaactaggtaaccaccgtacgtatcaggactttatttattgattgaagaaagcatatcataggcatgccgctttttcaagcgtttacatgcccatatccatgcgtctattttactgttttacctttgttttaatggctaaacttagctcatcaagctgcgcttcgcttacagtgccaggagcatctgttagcacacagctcgcacttgccgttttcgggaacgcaatggtatctcttaagttagagcggccggcaagcagcatcactaagcggtcaagaccaagcgcgattccgccatgcggaggaactccatgctcaaaagcatctagaaggaagccgaattgttcatatgcctcttcttttgaaaacccaagtaagctaaacattttttcttgaatatccttttcgaaaatacgaatcgaacctccgccaagctcatagccattcagcacaagatcgtaagcctgtgccttcatgtcttccgggcttgtctcaattaattcaagatcgtcgcgtactggcattgtgaaaggatgatgggcagcatagaagcggccttcttcttcatctttttcaagcagcggccaatcaacaacccataagaagttgaatagagactcatcaatgagttcaagctctttgccgagttttaggcgaagggcaccaagtgcatcatggacaacagacgtcttatctgcaacaaaaagtaacaggtcaccttcttcgacttgcagctgctcctttaattctgcctgctttgcttcatcaaagaatttagcaatcggtccttttaattctgtcccttctgcttttagccaagctagaccttttgcaccgtagttcgctgcaaatgcaccaagggcatcaatgtcttttcttgagtagttggctgcagcacctttgacattgatggctttcacagctccaccatttttcacagctccgctaaagactttgaaatcggaatcttttaccgtatctgaaatgttgacaagcttcatctcaaaacgtgtatctggcttatcagatccataagaattcattgcttcatcgtatgtcatacgaggtaatggcaatgtcaggtctacgcctttgacatctttcatcacctttgccatcatctcttcggcaagcgtcataatgtcctcttgactcataaaggacatttcaatatcgacttgtgtgaattccggctgacggtcagcacgcaagtcttcatctctaaagcagcgggcaatttggtagtaacgatccatccctgagaccatcagcaattgtttaaatagttgcggagactgaggcaaggcatagaactctccttcgtgtacacggcttggaacaagatagtcacgtgcaccctctggcgtactcttcgttaaaatcggtgtttcaatatctagaaagccgttgtcatctaagaaatggcggaatgcttttgttacttcatgtcgcattttcatcgtttcaaacatagcaggacggcgaaggtctaagtaacggtattttaagcgcacatcttctgatacctcgtccgcttgatctgaaatcacaaaaggaggggtcttcgcttcatttaacacgctgaccgtttcgacttgaatttcaattttccctgtttttaaatttgggttgattgttgcttcttctcttgcgacaaccgttcctttaatatcaaggacatattcattacgaatcgactctgctgtctcaagcgcctcttttgataggtctggattgaagacagcttgtacaatccctgtacggtcgcgcagatcaataaagattaatccgccaaggtcacgtcttttttgaacccatccttttaatacaacggtttgaccgatttggtcttctgttacttctccacaataaaaagttctaccaaacacaaacattccactccttctttacgccttcttgtgggccttcatcatttgaatcagctcatcaagcttcacttcaatttgttcacccgttgtcgtatcttttacattcacaatgcgctgcgccagctcatcttcaccaaggactgcaataaacttggcttttaatcgatcagccgctttaaattgcccttttaatttcttccctgtatagtccatttcacttgaaatgccttcttttctcagacgatttaataatgaaacagagtaatccttcgcttcatcaccgagtgcagcaatgtatagatcaatgccatcttgcagaggaagatcaatcccttcagcatcgattgctgataggaaacgctcaatactcatagcaaaaccgattcctggtgattcaggaccgccaattccttcaacaagtccatcataacggccgccgccggctaatgtggtaatcgcgccaaagccttctgcattactcatgatctcaaatgccgtgtgattgtagtaatcaagaccgcgcactaagttcggatcgacgacatattcaatgcctatatctgttaagtattgtttgaccttttcaaaataagtccgtgattcttcatttaagtaatcttgaatggatggagccgttgccatcaattcgtggtcacgatcctttttacaatcaagaattcgcagcggattttgatgtaaacgggtttgacagtcatgacagaattcatcaattcttggctcaaagtgctcgacaagtgctttgcggtagtctgcacggctctctttgtcaccaaggctgttaatgacgagctttaagttagaaaggcctgctttctcataaacactcatcgcaagtgaaatgacttctgcatcaatggcaggatcctttgaaccgatcgcttcaatcccaaattgataaaattgacgatatctccctgtttgcggacgttcatagcggaacatcggtccaatgtaatacagctttgttggctgcgcgggctgtgcaaataatttattttcaacataagaacgtacagttgaagccgttccctctggacgaagggtgatgctgcgtccctttttatcttcaaatgtatacatctctttttgaacgatatcggttgattcgcctactccccgtgcaaacagctctgtatgctcaaaaatcggtgtacggatttctttgtattgaaaggctgcacatgtatctcttgcaatttgttcaacatactgccagcgttctgactctccaggtaaaatatcctgtgtgcctcttggaatattaaaactcatttttcgtcctcctacgaccatcattcattttttatgtggacatataaaaaacccccgcctctactatgtgtatagtagggacgagagttatacccgtggtgccaccctagttggaacatgatccagccatgttcccgctcaaatccttaacgcagattcacgttctccgcctattgactcatttttagagcgttcagcaggaaacctacagagtgttctttcgtgataaatgccatgcggattcgctttcagcctaaggcgattcctctctgctcacgcaatttaccctactattctctatcatcagttccacattttaaattttcaagtgtgttgatttatattataataaggtcggtgctgccactctgtcaacccttgccgtgcctctttttcttttccagctcttcttttgacgtacatccgtattcagatgcggtttcttcaaggaagcctggttgatccatttcgtcgtgctgccagcgatcgatatcacggtgtccattatattgcactcgtcctaattttctgcttaatctcatgtttgtacatccttttatcacgtttttatttagtataaacagattgattcatttttattagggaaactgcaaggaattagtccattacataacgaatttacattcatcggttttacaagggaggggaaaacaccgttttgaatctaaaaaaacacaatcaaatgttgatgcttcttacctgttttgttctcatcgcaagtactttgcctatgacacatgctacagcacaaacagatcaagctgtggttgcaacagatgaaatcaatgtgagaacgggccctggtttaagctatggaatcgcagctgttgtgaagcgcggagaaagctatcccattctcactaaacaaggagaatgggtgcagatccaattgtcaaacggtcaaaaaggctgggtcgtctcatggctgattaccacatcatctggcagccaaaaatctgctaagccaaaggcgcaaaatcagagcgcatcaggcagcagttccattacatcgacagcctcggatcttcgcatacggacaggccctgggacttcctatcaagtcatcggaactttcccgcaaggcgcttccgctaaaaagctgaaaacaagcggcgaatggacaaaaatttcgtataaacaagcagcaggctgggttcactctgattatgtttcaggcggcaaaaaagcttctcaatcaagctctggcgagtcctctcgctctaaacagacaggcacagttggcgtatcgagcttgaatgtaaggcaatcggcggcaccgaatgcacaagtcgtcgcttcacttgcccgcaacgcacagatcaccattttgcgcgagcagaacggctggtatgaaattgaggcaaaaggcgtaaaaggatgggctgcaagctattacatcgtcacaagcaatggagcgagttcggcgggtgaacagaattcatcttcttcgtcttcccaaaagaaagcgtacattgtctacgatggcaccaacatccgaaaaagcgcttctacctctgctggaattgcagaaagagccacaaaaggcgctgcctatcaaattgttcgcacgcaaggtgactggtacgaggtgacactatcaaacggcggaactggttatgtggcaagctgggtcgttcaaacgaataaaaatagcagcgaagcaccaagaccacagcaggattcatcgtctggaactgggtctttaaaaggaaaaacgattgttcttgatcctggtcatggcggaaaagacagcggcacgattggcgcagatggtgcatttgaaaagaacattaccatcaaaaccgccaatttacttgcaggcaaattaagggcttctggtgcaaatgtctatttaacaagaagtgatgatacttttatcagccttcaatcgagggtcgcgacatctcattacagaaatgcagatgcatttattagtcttcattatgatagttttatggacccaagtgtcagaggaagtacagcgtattattatcaagcagcaaaagaccagcaattagcgacaaatgtccatacagaagtcgctaaacgctctcaaatccctgataagggtgtcaaattcggagattattttgttttaagagagaacaaacgcccttctcttttatatgaactcggctatttaagcaatcctcaggaggaagcgatcatttatagcgcctcttaccaagaacgagtcacagaaggaatgacggaaggattaaaacaatatttccgttaaaaagaaagaggcctctgcgcctcttttttgtttgatcgcaaaagaaaaagactctaaacaaactcctgcttgagtttatctacagtctaaagcgaatctattctttgctatccatccagatggtgacgggccctgaattggtcaatgacacatccatcatcgcgccaaagcggccagtttctacatgaatgcctttttctctaagggctttattgaaacattcgtaaagggagttcgcggcatctggcttggctgctttcataaaattcggtcgtctgccctttctcgtatcaccataaagggtaaattgagacacagacaggacgcttccttttacatccaataacgaatgattcattttcccgttttcatcttcaaaaatacgtaaatgtgcaagcttttctgctaaataaagcacatcttcttctgtatcttcatgtgtgacaccaacgagcaccatatacccttcattgatggcacctgtgatctcttcttctaccttcacagatgcacttgtcacacgctgcactacaagcctcatagacgatatacttcctttctaattcatgaatcggcgaacagagtaaatgtctttgatttgtttaatgcgctctactactttgtgcaaatggttaatgttttggataaagatcgccatatggatcgtcgccactttgttacggtcagacttcccagaaactgaagagatgttcgttttggtttcattgactgcttgaagcacctcattgagtaagccgcgtctatcatatcctaatatttcaatttccacattgtattctttacggtttcgagcaggctgttcatgctcccactctactgggattaaccgttcctgcgcttctcctgtcttcacgttcggacagtcatcacggtgaacagatacgcccctgcctttcgtaataaaaccaacaatgctatcacctggaacaggattacagcacttagataagcggacaagcaggttatctatccctttgactcttacgcctgcttctcgttttttcccatgatacgtctttgactctactgtcacttcttgaacagttttctcttgttcttcttgatctctttgttttctttctttttctgttaaacgattggcgacttggagtgcagtaattccgttataaccaaccgctgcatacatgtcctcttcgtttgaaaaattaaatttgtcagccactttttgcaggttttcagctgtcagaatgtctttgacatcaaactcaaggtttttgatttctttctccacgagttctcggcctttttcgacattttcttcacggcgctgttttttgaaaaactgtctgatcttgtgcttcgcttgggaggtttgggcaagtttgacccaatcctgacttggtccatagctgtgcttagatgtcagaatttcaataatgtcacctgttttcagtttgtgatcgagcgtgaccatcttaccgttgactttagcaccgatcgttttattcccaatttccgagtgaatccggtaagagaagtcaatcggaactgaacctgacggcagttcaatgacgtctccttttggtgtaaacacaaacaccatatcagagaagagatcgatctttaacgattccataaattcttctgcatctgtcgattcattttggaattcaaggatttctctaaaccaagagagcttcttctggaagacagcttcctccgttgattctgctgactcttttccttctttgtatgcccagtgcgctgcaattccgtactctgcaatttcatgcatttccactgtacggatctgaacttcaagcgggtcaccttttggcccaatcactgttgtatgaagggattggtacatgttcggctttggcatcgcaatataatccttaaacctgcctggcatcggcttccagcatgtatggataataccgagcacggcatagcagtctttaatgctgtcaaccaaaatacgaacagccagcagatcataaatttcattaaactgcttattttgcaggaccattttgcgataaatactataaatatgctttggtctgccggaaaattcagccttgatgttcacctctgacacacggtctttcacttcattaacaacctcgtccaagtattcctcacgttccgctcgtttgcgcttcatgagattcacgatccggtaatattgctgcggatttaagtaacggagcgctgtatcttcaagctcccacttaatctttgaaatccctaatctgtgcgcaagcggtgcaaagatttcaagtgtttcatttgaaattcttcgctgcttctcctgaggaaggtgtttgagcgttctcatattgtgcagacggtctgccagtttaattaagatgacgcgtatatcctgcgccattgccacaaacatttttcgatggttttcggcctgctgttcttcttgtgatttatatttaatcttcccgagctttgtcacaccatcaacaagcatcgcaacttcttcgttaaaatgctcttttaaatcctgtaatgtcacatccgtatcctcgacaacatcgtgcaggaaaccgcctgcaatggtcgatgggtccatttcaaggtcaacaagaatccccgccacttgaattggatggataatataaggctcaccagatttccggtattgctccttgtgtgcattttcagcatattcatatgctcgctctataaattgaatatgttcagcggacaggtattctcttgccttgtcaatgacctgctgcgccgttaaaacttgttcgttcgccatggaatcacctttttaaatgaaaactgtattgtagtttattatcaagaaaaattcgatagatgtaaagagaagaagtccgctaaaagatttttgataggaaaaaagcacccttcttaccgagtgctttttgcgtaaaactccattagtattgcattaacgtcaagatgtcgtaaccgtcaagcttctttctgccgtccagatacgtcaactcaatcaagaatgcaattcctgccacaacgccgcctaattcctctacaagcttgatggatgcttcaattgttccaccagtcgcaagtaagtcatctgtaatcaggacacgctgaccaggacgaatcgcatctttatgaatcgttaatacatctttaccatattctaagccgtaatcgactttaacgacttcacgaggaagctttccttctttacgaactggtgcaaaacctacacctagtgcgtatgctacagggcagccaataatgaatccacgcgcttcaggtccaacaatgagatcaatgtctctttccttcgcgtattcaacgatttgatccgttgcataacggtacacttcgcctttatccattaacgttgtaatatctttaaattgtacaccttcctttgggtagtcaggtacaactgtcacatattgttttaaatccatcttttccttttcctcctcgtacgtcaaagcacaggtgagacttcgctcatcatgctattcagccattccttcagctctttggctgaggaatatgttagtgtttgatcgagttccatcaatcgttgttttgctgtataggatgctgatgccgttaaatcttttttaggggcatcacgtactattgacagcacaccattctctattttaacaaaaccgagttcaaaaaacacctttgtcataaaaatgattgtttcttttgtccagcctctatgtttggcaagctccattccttgttctttgagggggaaacttcctcgttttaacaagaatccataaaaccatttgaattgatcacggctagggaaagaagacataaaatgatcttcttttctttgaaaaaccgtataaactctagctggcttttggttttctaaaagtcgccttagcaaatgctcatctgcaggaacatccgcaaagacgatatacttgccctctacatcgaacgttgaaacattttctgcatggacatgataaattgggatattgacttcctgttttgtttcttcgtcaaaacagaccaccacatatttttctggatcaagcgtggagattgtcttttcccaatcctttttgccgcgcaaatcaaacagctgccattcatctactcgggcatcttttagcataagctgaggtttcttccggttattccattcattgatggacatttcaccaatgacggaaatgcggctacctgtgacaatttcttcttttaattggccttgatgaaaaccgacacagtcaagcagcttgtcttcgtctttcagagacattttaatatgattctgatttgccccaatcgttcggatctcttcaagcctcgcatcttcaatcatgatgaacggctttggattctgcatgccaaatggtgacagcatccccacttcttcaatcgcttcaaccgtcaattcgtctaccttgcatacggcatcgacccgctgaatcggaataaaatcttcttctgtcaacgtttcattcgcatattgatttaatctttctcttagtaaaggaacatcatccgctcgaagtgtcatacccgcagccatcgggtgcccgccgaaatgcggcagaatgtcacggcatttgcttaaatggaaaaatagatcgaagccagggatactccgcgctgatccttttgccatttgcgtctcttcatctattccaagcacaatcgccggacgtgaaaatctatccgtcaatttagaggcaacaattccgacaacacccggattccagccagctttcgctacaacgatcgcagactggtcatcacctgtctcttcaaccatttgaatggcttcttctgtgatcgtactcacaattttttgacgttctttattgagttcttgtacaaaacgagcgagctcttctgcttcatccttatcctctgtcatgagaagatgaacagctggatctgcctgctcaattcgccctacagcattcagccttggcgcaatttgaaagccgaccgtttcttcatttgcttcttcaagagtagctcccgcttctttcaataacgctttcagccccggtcttttcgactgcctaagctgcacaagcccttttttggcgagccatctattctcatcatgaagcggcacaagatccgctattgtcccaattgccgcaagatctaacagctgagctggcagcttcccaagaagtgcatgcgccactttaaacgctacgcctacaccggcaagttctttaaagggatactcacagcccggctgcttaggatggacaatcgcaagtgcctcaggcagctcctcacttggttcatggtgatctgtaatgatcaggtctaatcctatttcttttgcaatacgtgcttcatttacagctgcaatgcctgtatcgaccgtgatgacaagcgatgcgccttgctctttgatatatcggaaagcctgttcattaggcccatagccttctttaaatcgatctggaatataaaagtctactttcgcagaccgctcttttaatgtatgtaaaagcacagacgtacttgtcacaccatccgcatcatagtctccgaagatcacaatcgattcctgctcttcgatcgctttgttgatgcgctctactgcttctttcatcccttttaatagaaatggatcatgaaattcggctttttgatcaaataaaaaagacctcgcttcttctacttcttcgagtcctctttttacaagaagcgatgcagtcagcgctgaaatattcagattttcagagagtgatttcactttttcttcgcttggatgttcatattcccagcgcattttggataataacataaattcacccctcaaccacactattatactagagtggcctgaggggtttcaatttttattttatgaaattgtgctggaagattatttttccttccggttaaatgatgctggctgttcttttaaaggcgtcacattcggtttcttttgaacgtctttgtcgatctttttattcgaagcagcaggtgcaggtgcggctgcacgctcagcttttaaagcctttagttcacgttttagtttcacaatttggaaaatccctgcgaaagccacaatgagtccgcccattagcacagaaccaataatgacaagaatcagcggccattcagccgttccaaataagtagtcaacttgcactggccgcacattgatcacggcaaatactgagacaattaatacgaaaataaatgcgaagatgatggtccattgttgtttgttcatctacatatcccccaagctttttcttttattcttcccttttccttgtcctttttaaacacagaaagaaaatagcggaagaaaatctatcagcatgggcatgattagctgctgagtttttctttaatgaggttctttatttcttgtctttctccagaaataacaagggtatccccttcttcaatgaccgtatcaggtcctggatttaacatcttctcatgtgattttctcacgatagcgatgactgttacttgatcattttggcggacattgaggtctccgattgtctgctgaacagctggtgcattcttttcaatcttaaaccattcaatcatcagttcatcaatggctacctctacagtttcaagcgctttcggcttatataccatgccgcctaaaatagctgcaatttgtcttgcttcttcatcgtttagcaaaataccagaaatagattcttcatggtcgtcctcttgaaaatgatacatttctcttctgccgtcatcgtgtgtaatgatggcaagcttctcattatttcttgtgatcatttcggctttgtgaccgatacctggcagttcagtttcccgaaccttcataacagcccctccaatgaataaagccaaatgcctcaaacggacacttgctttctatactgctctaaacgtatgtcattatagcaaaagaccatttcaagatcaatgatacccgaaatgtttttttcgaatcgacttattctcgggaaatctatagaaaaaagactgccaaaaaggcagcctttctcaattaaatatcttgctcagtatcaatcttcgccggctttttcaactcacggcctttccacatgagccaaatttgtgctgcgatatatagagatgagtacacccctgttaacagaccgacaagtaaggcgatggagaagtttgtaatcgacgccgatccgaagataagcagtgcgatcacaacaattacgacagtgagtaccgtattgatagatcgtgtaaaggtttgctgtaaactcaagttgacgatgtaagatagatcttctaccgtttttggtttacgtttcttcatttgctcacgaaccctatcgaacgtcacgatcgtgtcattgatcgaatacccgatcaccgtgaggatcgccgcaatgaaggtcacatctacctctaatcgtgtgatactaaagaatgccacaatgaagaatgcatcatataaaagggaagcaatcgctgcaatggccattttatattcaaaacgaatggaaacataaataatgatcccaatcgaagcaatgatgatggcatataaagcattgcgtgcaagttcttttccgacagtaggagacaccgtgctgacattcggttctgtaccatacttatctttaaagtaatctttcacttctgcgattttttctttatttggcacaccaacaaatcttgccgctgcttgattttctttttgaccagataacacaacactatctgtatcaagatctaatttttgaaagtcttgctcaatttgagcagttgacagcttatggtcactttgaatgtctactcttgtaccacttgcaaagtcaatacccgcattgagtttgaaaatcgaaaggacgataatccccgcaatggtaatggctactgagaaaatcatgaaaccttttcgcttgctgacaaaatcccatttatcaaacggtgtttttggttcagtattttctgttgtttcatgaatatcgatgatgtctttttgacggacaccaaaccagcctttcttgcgatcgagcgcgcggctttccacaagcagtccaagaaggaatcttgataggaatacagccgtaataaagcttgttaagatggaaaggatcagcatagtcgcaaacccttttacagaacttgtcccgaagaagaaaaggacgccccctgcaataatactcgttaagtttgcatcaaagatggtcgcaaatgatcggcggttccctgacctgaaagcagaacggacagatttaccgagcttaagctcctctttgattcgttcatatgtgatgatgttggcatcaaccgccatccctactccaagaatcagtgccgcaattccaggaagtgtcagaacagcacccatccagtcaaacacctgtaaggtaatatagatatacgttgataacgtgatgacagcaataagaccaggtattcggtaataaaaaagcatgaataagaaaatgagggcaattcccacaatccctgcaaagacagtttcatttaatgcctgttcaccaaattgcgcactcactgatgtggagtacttttcagttaatttcactggcaatgccccagcatttaaaatacttgcaaggtcttttgcctcttggacagtaaatttcccttcaatttgcacgtcactgctgttaatttcttgattcacattcggcgcagagacatacttgtggtttgattttgagacttcttttttgaaggaatctcctttgtggtaatcaagccaaatgacaagctggttattcggcgccatcgccgctacttttcttgtgacgtcaccaaattttttcgcatcctttagtttaaccgtcacaattggctcattcgtttgactgaatgtttgttttgcactgttttcgaccaagtcagccccgtttaggagttctttatcattcgtatctctgaaggatagctgtgcttcagtggaaagaatctccctagctctgttttgatcttttacccccgcaagttgcacgcggatacgattgttgccttcaatcgagatgttcggctcacttacacctagcacattggctcttcggtttaaagcctccactgtactgacgaggacactatttgtaatcttgtcctcttttttcactggatgtacatcatacaggacttcaaatccaccctgcaaatccagccctagcgtcatatctttcgcaacaggctttgttagtaagcctacgccagttccgattaacagaaccactaagaaaaacgcaagaatgcgcccttttttcattatgtatttcctccttaaacacctgaatccattaagatggcttatttcaacagttcatctagcatattcttgccatcttcactgtccaaaaaagcagacgttttaaacgactgaacggttgcatagttcataaattcgccaattttcacagataaaatatctgcaaccatttcatgaatcggatactcttgttttttcttccacttcttattctctaagtatgaccataattcctctaaatctacatctttatagcccaaaacgatgaattcttcaagcttactgaacagaaaaggctttaaatggtctttgtaaattgcagccggatgttgtgtcaatgggatgctcccccttttcagtttttatcgagagacttgtcatgcttggacgatatacacgcatatcttattgtatatgattctatgtcgtttgagaaggcaggtgatctttgatttgacgaagcaaacgtttttaaagggcacgattattttaattttagcaggttttatcacgagaatattgggttttgtcaatcggattgtgattgcaaggttcattggcgaagaaggagtcgggctttatatgatggctgcccctaccttttttctcgctgtgacgctgacacaatttggactgcctgtcgctattagcaagcttgtcgcagaagcagaagcccggggtgacaaacagaaaactaaacgtattctagtcatgtcccttgcgataacagggacactcagcctgatattcacgccgctctttttatggtttgcacccatcatggcagaaaatatgctgacagatcctagaacggtctatccacttcttgctattacgcccgttgtcccagtcatcgccatttccagtgttctgagaggatattttcaaggcagacagcaaatgagcccgcttgccatatctcaagtactggaacaggtcgcaagaatttctctagtggcagtatgtacaacagctttccttccttacgggattgaatacgcggcagctggtgcgatgatttcatctgtcattggagagatgatttcacttgcatatttactgattgcctttcgttataaaaagaccattcgtattcgaaaacgattttttaaggcgattcatgacggtaaggatacgtttaagcagctgatgagtattgccctgccaacaacaggcagccgtttcatcgggaatatttcgtggtttttagagccgatagttgtcgcgcaaagtcttgctattgctggatatgcggctgtagaagcgacacggcagtatggggagttgactggtcttgcgctgacccttttgacactgcctagctttattacgtactctctatccactgcattggtcccggcgatcagtgaaggaatggagcagaacaaacgcaaaacggtcgaataccggctgaagcaggcgatgcgtctttgtctactcagcggaggcatttcctgtattattcttttcgtttatgcagaagatttaacgctctttatgtatggttcatcgcatgcggctatctatgtgaaattcatggccccattttttctattatattattttcaagggccgcttcaagctgtcctgcaagcactcaatttagctggcgcggcgatgacgaatagtctgataggtgctgttgtgaaaacagggatgatttttgtccttgcttcacagccgggctttggcattatgggggcagcactcgcgatattaatcggcatcgtccttgtcacgctgcttcatgcggcaactgtcggtaaagtactgcctattcatttaccaatgaaggaatatgggatatgcgttcttgtgatcatcggcaccggggctgtcagcctttggctgaagtctcaagtaaacgggctcttttctgcccctattgagcttgtgacgctgatctttgttacgtgtatgctatatgtcattctattaatctgtctagggctagtgaagcgtgaagagcttcgccgcctcccattcattgggaaactgctttagctcatctcttcttgatcacttcatctttcaaatcaatataaaatgtcttttgattaaagctgcagtaggaaatctgatcaatttcatgatagccccttttggcaagctcatctttcagccactgttcattttgattaatttgcttcagatgatcgtgctgtacaacaccatctgcaataagtggcagctcaagcgctccgtgtgtgtgcttgttttctttttcaacgaccgcaagctttccggatggctctaaaatggcgtaagagacatcctgaatgctatcgatgttgttttctcttaattgaataagcaggtcatcaaaattgtatcgctgttttctcatcgcaccctcgtcgattttcccattgatgatgagcagggccggtttgccgtctagaaagcgccggacaccttggaatttcaatgagaggtaggcgagtgtgatttgaatgaaggttaacagcaggatcggccataccgtatgtaacatgtgatcttcgacttcttctatggcgagaactgcaatttctgcgatcatcataaaaatgacaagatctaaaatactcaattcgccaatttctctcttgcccattaaccgaaaaataaaccaaacaagaaaatataaaatgattgttctcatggagataatcaagatgtcctgcatgtgatgtaaacctccttctccaccatagcttgtgtcaaaacactttatttatgtagaaaagaaagcctctgtttttatcgtgagaaacatgtctattttttcttcatggtgaatacattttagtaaaagacaagcttcggtcaattggagaggagacgaatcacatgcaggaaacgaaacaaatcggaaaagggattttatccggcttaatggccatttttatcgtgatgattgtcacaagtttacttgtatcgctcatgcttaccttcacaagtatgcaggaatcatcgtttaaatggatgattatgattttgtcctttgtggcacttttattaggagggatcatttctggaggaaaagcaaaggagcgcggctggctcattggcgcgatcacttctatgatcttttctctcactgtattcttatttcaatatttagggtttggagaaaccttttcaccagagcagtttatctatcatggggcatttctagggatttgtatgctgggcggaatgattggcgtcaatcttcgaggcaaataaaaaaagagcggatcatatcgctctttttttatggctatgtatcggaggattaacctttgtcagctaattctctaatagcacgtcgatcgaaagttaaacggttgttctcgctagttttgatgaccacttttgattcatcaatgtagtcgatttcaccgtgtaaaccaccgattgtgacgattttatcgccttttgataaagattgctgcatctgacgcacagctttttgttgcttttgctgtggacggattaacaagaagtaaagcacagcaaacatgacaacaatcataatgattgaacccataccaccatccattctatttcacccctttctaaagcattataaagcctttcgtttatgcgttaaaagtttttcgcattcggttcgttaaagccataacgttcaaaaaactcttctttaaaatcacctaaacgatcctcacggatagcttctctcacttgctccattaattttaacagaaaatgaagattatgataagttgttaatcgaattccgaacgtttcatttgttcggattaaatgtctaatataggcgcgtgtgtagtttttacatgtgtagcagtcacaattttcatcgattggtctgaaatcacgttcatattttgcatttttcacaacaagacgtccttcgcttgtcatcaaggtgccgtttcttgcaattcgcgtcggcaatacgcagtcaaacatatctacaccgcgaatggcaccgtcaattaaggaatctggtgagccgacacccattaagtaccttggcttgtctgccggtaacaatggcgttgtgaactccagtacacggttcatcacatcttttggttcaccaacagataagcctccgatggcgtagcctgggaaatcaagtgaaaccagatcttttgcactttgtttacgaagctcttcgtattctccgccttggacaattccaaacagcccttgatcctctggacgctggtgcgcttctagacagcgctctgcccatctgcttgtccgctccacagaacgtttcatgtagtcgtactctgctggatatggcggacattcatcaaatgccatcataatatcagagccaagcgcattttggatgtccatggccttttcaggagaaaggaacagcttgtctccgtttaagtgattacggaagtggacgccttcttcttcaatttttctaaattcactcaaagagaatacttggaatccgcctgaatcggtcagaatcgctcgatcccagttcataaatttgtgcagcccgcctgcttctttcacaatgtcatgacccggacggagccataggtggtacgtattgcttaagatgatgcctgcatccattgcctttagttcttcaggtgccatcgttttgactgtagccagtgtacctaccggcataaatacaggtgtttcaaaggagccgtgcggtgtatgaacgcgtcctagtcgtgcacctgtttgtttgcatgttttaatgaactcataacgtatcggtaattgcgacaaaaatgagccctcctgtctttgttgtatgatgttattgaatcagcatggcatcgccaaagctgaagaatcggtattcctcttttacagcctcattgtacgcttttagtacatgctctcgtccagctaatgcgctgacaagcatgattaacgaggattttggcagatggaaattcgtgatcatgccatcaatggccttgaatgtatagcctgggtaaataaagattgacgtccagccgcttgacgctttgaattcgccgtcatgcgcacttgcaatggtttcgagcgttctcgttgacgttgtcccaactgaaataatccgtccgccttccttgcgaacgcgattgagctcttcagctgtttcttcattcatttcgtaaaactctgcgtgcatttcgtgttcttcaatacgttctgcactgaccggacgaaaagtaccaagccccacgtgcagtgtaatgaaagctatatgcacaccttttgctttcagcgcatccagcagctcgtttgtaaagtgaagaccagcagttggagcagcagcggagccaacctcttttgaatacaccgtttgatagcgttcacgatcgtcaagctgctctttaatataaggaggcagcggcatctcaccgagggattcaagtacttcataaaaaatgcctgtatactgaaacttaacttttcttccgccatgttccatctcttctgtacataccgcttgaagccgtccatcaccaaatgtgataaccgttccttttttcacccgtttggctggttttacaagtgtttcccagttgtctccctcctcttgttttaatagaagaagttcaacttttgcacctgtatcctctttcattccaaacaaacgtgccggcagaacgcgtgtattgtttaaaacgagacaatcacccgtttgaaaataatcggtgatttgtgagaatgtatcatgtgtcatcgcacccgtttgtttgtttaagaccatcagtcttgatgcatctcgtttttcaagcggcacttgtgcaatcaatctttctggtaaatcaaaatcaaatagttctagcttcatttccttcacctattctgtagttaactagttaacgttatttcatccgtccaaagatattaagtaatatggttagcacaatgctaatggcaatgcatgtgatcacaggaaaaaagaacgtcacatttccttttttcacaaaaatatcacctggaagcttaccaaccaattgaaatactaatcctgcggcaaaaaggacaccacctaaaatcatcaatattttagggaattcagtcacgaatcggaacctccatttgaaaatgttcatacgcttctcttgtgacgacccgtcctcttggtgttctttgcaggaaaccaatttgcagtaaatacggttcgtacacatcttcaatcgtatgtgattcttctccaattgtcgctgagattgtatcaagccctacaggaccgcctctaaatttttcgatcatacttaaaagcagcttatgatctatatgatccagaccaagcctgtcgacttgaaggcgctcaagggcatcttccgcaatgtcctcggtaatcgcatgattcccaagcacctgcgcaaaatctcttactcttctgagcagacgattggcaacccttggcgtgccccgggaacgtcttgcgatctcttcggctgagcgaagatcgatcccaatctcaaacagctcggctgttcttgccacaatgtgagccaaatctctttgctcatagtattccaatcttgcatgtaccccaaacctgtcacgaagcggtgctgttaaaagccctacacgggtcgtggcacctacaagtgtaaatggcggtaaatcaagccgtacagagcgcgctgtatctcctttgccaatgacgatatctaaacaaaaatcctccattgccggataaagcacttcctcaattgagcgctgcaagcgatgaatttcatctataaacaacacatcacctggctcaagagaagttaagattgccgccaaatcgccaggacgttcaatcgctggtccagatgttgtacgcagctgaacattcatttcattggcgataatcgacgcaagcgttgttttcccgagtccaggcggtccatataaaaggacgtgatcgagtgtttcctgcctcatgtgggcagcttcaataaacacactgaggttatcttttactttttgctgaccaatatattggctaagtgtctgtggccgcagactttgctcaatggctgattcatggttgtctgcttcagttgagacgagccgttcatccatgagacatcaccctatttcaacattttttgtaaagcttttttcacatattgatcggttgtgagattcttttcttcttttaataatggaagaacctttttaatttcacgatcaccgtatccaagaacatttaaggcttcaagcgcttcgtctaatgccgtttgctgcgtttcgacctgaatatggtcctcgtgattaaataggttgccaatcatttccggtacgacatcggctagctttccttttagatcgagaatgatttggcgagctgtctttttgccaacaccagggaacttaatcaggaacgcttcatcttcacgttctatcgctgaaatgacagcgccaggatcaccggaagcaagaatcgctagagcccccttcggcccaatccccgtgacatttaacagttttgtgaacagcgctttttcttctcgcgtttgaaatccatataacgaaaaagcgtcttcctttatgtaatgatacgtataaatcgtttcttgtttgtttacttgatagataaacgggtttggggtatagacttgatatcccactccgccgttttcaatgacaacatattgcgggcacacataatcaatggtcccttttacaaactctatcaccgttttcacctctttgactgttcttcattgtaacataaatcgagaagaaaaccgcaataaaagttaacatacgttcgctcaatgcatttttacgataaaaccacgaaaaacagcttgcggccttcacaccagcaagctgttacacgctttaaaacgatatttcatttcggtaaggcttcatgacttcaagcacatgctcaaattcatcctttgttcgaaaaggaatgccttgctcaagctgctcctccacatgactttctaaacgggacgtatcaatttgaaaaaagagatgaataggctccgcccagccgtcaggccttccatgaaacgtagaaatcacaccgtcctctgataatccgatatatccatttgctttacttaatggagagatatcatcaatttgctttctaaaaagcgcaaaatcctctctctgttctactagcgtccagcctttatactgtgcccagaatgtgtctttgtcttctaatgaagcccggtgtctttcaatactcacatctccgtctagatagactttttcaagctgcacggtgatagagtttgactgcttttgcaagtgttcttttccttccatatccgcagcgaaaaaaagcacacttgtcatgataagtcctgtaacgaaacatttcatcttcactttcactatttacacctctttagaacatgagatcgatgcatgacatatgtagtttgacccatttttctaaacattaaccaaatcgatgaatgaatatatgggaagagtctttcgttgtatccttcattcgtaaatggtatgttttatacaatccattgctttatcgaatgactcggttttttcatcattcgtttttcagccgcataaactgaaaccaaagaaggtgaagtcaatgtcagatgttaaaagattagccgaatcgattcagtatcatgaagataaacgtcttcataagcttgcctttaaaccggcagagcttgaactgtgcggcaaaggaagaagtgcctatgtcttttcatacaaaaaagacggcaagaaaatggcactaaaagtctttttcccttcttatcaccatattgcccgcaaagaagccgccatttatgaaaaactttctggttcgtcttactaccctgagatttatgaatctggggatcagtatattttaatggaatatattaaaggctacacattctatgaatgcctcacaaaggggattcctattaaaaaacaaatgattgaacaagtggatgatgcgctagaagaagcacgcgagaaaggattgaatccttctgatatccatctgcggaatctgatcttaacaaaggaaggccaggtcagggtcatcgacgtagcccgtttcacacaaacaaaagcatgccaccaatggaatgatttaaaagccgcttacgcttattatcaaaaaccttttttccctaaaaaagcaccgcgtctatggcttgaagtgattgcttatttgtataaaaagaactggctgtcccgcggtcagcttaataatcgaaatgatttttctgcataatgaaagccgctcagagagagcggctttctgttttaatctgtttctacgtggatgctattcacatttaataagttaatgatttcattattcagcttaaaccaatgattggcttcttcaattttcttatacacatcataggtagctgggcgttttagctcgaaatcaagcacttccccattgttcatatgaaatgttaccttaaatactttcatcataagatcaccttccactctttcttgttagctggccaaatagatcggctcttttcattcattctctattcaacacgtttcccctccttctttcctttcaaacacaagaagtttaaattttgtttaaattcaaacaacatctctatccctctgctttgcaaagaagtatattatttaaaaaggaggctgtcttcatgaaacggcaaaagaaacgaacatctcccgaaagacaaaccgtcttttttcatttaacagatgccctcattccgagtttggacatgatggtatgcattaaaagcatttttccacctcttaagaaaagccttttccgccatctgataaaaccccgcacaacatatgtgcgaggttctttttttaggatgaataaatttgacttccttggctgataaactctttcgccttcttctccatctctcttttcacttcttctgattgattgcgaatatcatgggaaattttcatactgcaaaacttcggtccgcacatcgagcaaaaatgggcagtcttagcgccttccgcaggcaatgtttcatcatggaacgccatagctctttctggatcaagtgacaggtggaattggtcacgccacctaaattcaaacctcgctttcgataaagcatcatcgcgcttttgagcagcaggatgtccttttgctagatcagcggcatgtgcggcaattttataggcaatcacaccttctctcacatcttctttgttcggcagacctaaatgctcttttggcgtcacatagcatagcatcgctgttccataccagccgatcatggccgcaccgatggcggatgtaatgtgatcatatcccggggcaatatctgttgtaagaggccctaacgtataaaatggtgcctctttgcaaatctccatttgcttgtccacattctctttgattttatccatcggaacatgtccaggcccttcaatcatcacctgtacatcatgtttccaagcgatctctgtcaattcacctaacgtttcaagctctgcaaactgcgcctcatcattggcatcagcaatcgagcctggtctcagaccgtctccaagtgaaaaagcaatatcatacgttttcataatctcacaaatgtcttcgaagtgggtatagaggaaattctcttgatgatgggcaagacaccaccttgccataatggcaccgcctcttgaaacaattccggtcacccgatcgactgtcagcggaatataccttaacctcacgcccgcatgaatcgtgaagtagtctactccttgctctgcttgttcaattaatgtgtctctgtacacgtcccacgtcaaatcttctgccactccatttactttttcaagcgcctgataaatgggaacggttcctactgggactgggcaattccgtatgatccattctctcgttgtatgaatgtcctttcctgtagacaggtccatcatggtgtctgcaccccatctgatcgcccatgtcatcttttctacctcttcatcaatggatgatgtcacagctgaattgccaatattcgcattgattttgacgtgaaaatgccttccaataatcatcggttcactttcaggatggttaatattcgctggaatgactgctcttccgctggctacctcctctctcacaaactcagggcttagctcttctcttaacgcgataaactccatttcaggcgtaacaatacctttttttgcataatgcatttgcgtcacacaggcaccttgttttgcgcggagcggctcatgatgaaaatcagtatgaacatgatgaaaggactctttttccttagaacgatatccgttatcttctggtttcacatggcgcccttcatagctttctgtatcccctctttcttcgatccatgctgccctaaggcgttttaatcccttagtgacatcaatatgggctctctcatcggtgtacggtccactcgtatcgtacacacgaatcggttcattttgaatgttccccgcctgtgtcacagtttttgagagggcaatctccctttttggcactaaaatgtcaggtcttgatcctttctcatacacctttcggctgccgtcaaagcttgataataaggattgagttgttggggtatttttcttttctttcatttgctgttctctccttctcttcttgtcaccggacaggatggaatcagcaccagcaaaaaaaccaggctctatgaacagaacctggtttcgtcgacagaaataaacatgaatgtcattcatatgacccatgtatcatcttcaacttccccacgctggtacgagccagatcaggtccaaagggttaagaagcatacacttctctctcagcccaactgcgggcacccctagtcacatttattgatttccacaacagtgtagcatagagatgccatgaaaaaaagaagttttaggaaaatagttcctttccactacaaaagagatacagcaagcttgatatgcacctttatatacatcatctctcccaatcattcgataaaatatgaaataatcattgatccttttctcctattatgtatagttaatctaaactgagaatttttatacaaattttcccaaaggaagttctagtcgattgcaaacatttctcgcatttatcgtcgtaggattgtcaattcctctgccagttggagcgatcacggttgaaatgacaaaaagggattaaaaaacggattctttcatggatgctgaatttgctcagtttttatcactgccatttgtccaaatcccgctctggctgatcggagcagtattcttaataattcggatcaagacatccatttagctggcgaaaaagtcaataaatcattcgcaaaaacgtacagaaacggcttgcttgttgcggtgtcccctgtactggcagatgcatatccaaaaacagattcatctgaatttatgctggcttcaggcggtattttggcagggattctccttcatgacatctgtcttctcccccttgtatccttaacaagaaaggtattttattacttggatttggctgttatttcttttacgaattttatacaggcatcaagggttatttttaagaaaaggctaaagttcttgaggaactttagcctttcttattctccaacctatcgagtcatgcctgtttggcctgtttcaaattgtgttcttctcatatctctaaagcgtgtgaaagcaccctcgtctttaatgacttggacagctcttccatccgcataacgagtcgctgcttcttcaacttgtgatacgccctctgacgtcagacgtccatctgatttaatggcaatatacacattttcatctgtcaccatcacctgtgagtctgcaacgtggttcattttattgacacggttggcaatttttcttgaacgctggacgttctcttgtttatcgtagccagagaacgacatttggttatgatagttcatatctccatgactgtagcgtccatctccacctgcgagaggcattcgatcatcggcttgaggacgggtgcgataatcaacattcgttgtgttcccaccgttcatcccctccatgagttcagaaactggcccttgatgatcttgattattgtcagccgcacggttattcgaatgatatccgactggctgacctgattgattatgacgtgtatctacacctgcattatcatttgtaccacatgcagttaacccaataggaagaagcactaatgcgatcgttttttgccatttttgtctcaaacgaaaaaccccctgtacaaattcaatctcatgagcgcgaaacaggctctgttttagcatgtacagtttgggaaaaaatcaagctgtcagttataaacaaaaaaaggaacgattgagatcgttccttccagattgttaaaatgatctttattttagccctttgtctctttttcagcgtgatagaaaacctttgcagtctaggaagggcgagcaccggagcggagcgaatttgacattcgtgagcaccggagcacagccctgacaacgaatgcgagggtttgtctacacgctgaaaggaacgattgagatcgttccttctgtcattactcttcttcgtcttcttctggccttgcaaaaacagattgacctggatatggctgcatataaggctgagctggatacccccccatttggccataaggaacaggattcggataatgtcctggccacggctgatgctgcttcatgccatcatcacatccgcagtcttccttgccataagcttcatttgaaacgtttggataaaagccttgattcacgttcgcattggcatttgggtgcatatggtgatgccagtgatgcccatcgtttgcatgatgtgcatgatgttcataatgttccccgtaataagctggcgcttgatacgcaggataatacggctgagctgggtatggatatggcatcatgtgatggtgataatatggctggacaggataacaaagacctgaacctggtaaaattggcgatgctggcaccatttgttgcgggtatggatacattgccggcatgtaatgtccatgaccaaaaccataataaggatcatatgaatcatgatgctggtgatggtgatgatgctctttattctcagccattcctcctaccgctgcgcctccaacattcggcatttgcgggaaattaggaaggtttgggtaattgctttgctccatatcttttccctcctccttttgatgcggaatatgaataaacggatcatacccctttgccacttcatcttttagatggcctttattttcatcataaaaatggtccttgttatttttatggtccttattttcatgatgaaaatgttccttgttatctttatggtccttattttcatgatgaaaatgttccttgttatctttatggtccttattttcatgatgaaaatggtccttattatctttatggtccttattttcatgatgaaaatgttccttgttatctttatagtccttgttttcatgatgaacatgatctttgtgatcctttttgtcatgaacatgatctttcttttcatgaacgtaatcttttttctcatgatgttcttttttgggaggaggcgtgaatggctggtagagattggtctgataatagttcacatcgacttgtggaaaaactggatgctcgatctttggcactggcggtacataaggtaccggttcatttggcttttctttcggcttcgtatcttgaacttgcacgacatcttttggcttttctttcacatacggatgttctttcggctttggcatttcttttgctttgtgatgatctgtttttacaggaacaccactagatggaatcttgatcttcatacccggcatgatcaaatctgggttactgagttgtgaatttagttttttcaattcttgaaagtcgactccgtatttctttgaaattttccaaagggagtctcctttttgcacaatatgaattttcaacgttttcccctcctatgcaaaacgtgaacgtaacggttatgtcagaagtacaatatgtttcaccataaatttatgcctatttacaagccgatatgataaaaacttgttttctgataggaggggctgatttattatttaatggcgagcattttattcagtgcaagtaaagcctctttggtaatgtcttcattgacctgaatcaaaccgaccggatcacctttatcaatgctttctagtgaccataacaaatgaggaagatcgatccgattcatggtcaaacatggacacatatccggattgagggattcaatttgtttatctggatgctgatcgattatccgcttgactaaattcatctctgttccaatcgcccacttgcttcctgctggcgcttccttaatcgtatcaataataaatttcgttgaaccggcaagatcagaagccctgacgacttcatgcgtgcattctggatggacaaggatttgaatgtcacggtctctttttctcgtttcttcaatattccgcaccgtaaatttctcatggacagagcaatggcctttccataaaatcatcttgatgcgagaaagcggctgatcggtgatgagcttttcttctatttgatcccagacagccatttcttctagtgaaatgcctaaatcgaatgccgtattacgccctaaatgctgatcagggagaaacagaatccgctctttttgtgtgagcgcccactccagcacttttttagcgtttgacgatgtaacagtcgccccgccatgcttgccgacaaatgctttaatatccgctgttgagttgacatacgtgagcggtaggatcgtatctccaaacagatcagtgagctgctcccatgctatatccgtttgcttcatgttcgccatatcagccattgaacagcctgctctcatatctggcaataggaccttttgattcttatttgacagcatatctgccgtttcagccatgaagtgaacaccgcaaaacacaatgtactcagcctcctgattgtccgcggctatttgtgcgagctgcagtgaatcgcctgttgcatctgcaaattggatgacttcatccttttgataatgatgccccggtataaaaagctttgatccaaaggcccgtttaatgtctaacacacgctgcttcatctcatcaacagagcggtgtttatattcttctggcatcatggctgcatgttgatttgcgagtacatcaagcagtgacatgagttgttccccctttatgactgaattccatattcatactaaaatcaaatgctggagcagaatgtgtcaaaaaaccaagtgaaataaagtcgacacctgtccccctgtaacttggcaatgtctctaacgtgatgcctcctgaagcctccgtcagaattatctccggcgtcatttgtttaaaacgttttacttcgtctggagagcagttgtcaaacatgatgacatcggcttttgcatcaatggcttccattagctgcgtttctgattcaatttctacttcaattttcaccatatgaccggcatatgctcttgctttatctacagcttcacgaatagagccgcatgcggcaatatgattatctttaatcatcactccatctgataagccgaagcgatgattctttccgcctcctgtcttcacagcgtatttctctaacatgcgcaagccgggagtcgtttttctcgtatcacaaatcgtaatcgacggatccgctaatcgctgcaccgcttcatgtgttaatgtggcgatacctgtcatgcgctgcaaaacattcaaaatgaccctttctccttttaataagtcgctgaccggcccctttattttcgccagcacagcgcctgaatgaatccaatcaccttcctcaaaaaacaactcagcttgaatctgttcattcagcaggcggtaccctatgtcaatgacttgagaacctgccaatacacccgattgttttgcgatgatgtatgctgttcctttcttttctccaaaaatggcatcagctgatacatctccaaagccaatatcttctgtgaaaaaatgagtcatcatttgttttaactgtaaacgttccatttggcaccgatcctttcattttttatcatatgaatgtggcctttttcatggacaatctgcatgccccgccacaaagcatcattccgatttggataatccattcgaaaatggccgcctctgctttctgtacgaagtaatgcagacttcacaaggcaaatcgctaatgcccattgattgcttaattcgatctgttcacttgtgatattcttcacattcgtttgctgataagggacttgctgtaatacttgaagcaaggcctttagccctttttcgtctcttacaattgcggcatatgtcatcatccattgtctcaactgatcctctgaaatcgctgggacggaccatacttcttgaatagaaaaagatgggactatttttttctgtttaggtacctgttcaattctccgtgccgctttgtgtcctaaaacgagaccttccaagagagaattactcgctaatcggttcgctccgtgtaagcctgtacaggccgcttctccgatagcaaaaagagatggaacagtggtttctccatattcattcacgcagattccgcccattaaaaaatgcataccaggggaaactgggagcctgccgcttgccatatcgacacctgcccgctgacacatcgcattaattgctggaaaacgagctgaaaaatgtggaatctcgcggatattgagatacagatcatgacctaattgctgctcatgaaaaatagctctagcgaccacatctctaggcgctaaatcagcttgtgggtgaatgcttttcatcatcctcctgcctgtttcatcttctaaataggctccctctccccggactgcctctgaaacgagaccgactgcttttccagcgatcgtcaagagggtggggtggaattgaacaaattcaagatctgctaattgtgccccggctcgataggccatcatcagtccgtctcctgttacagaagggtcatttgtgtttgtttcatatagggagccgcagccgcccgtggataaaacaactgcatctgcggtcatggtatggacgtcgtgtcctttctcatctttccacaccacccctatgcaggttccttcatggaccaatagatcaatgacatggtgatattcgtataaatgaatatgtgagccaagctgactttttaaatactgcacgagggttttgcctgtttggtctcctcctgcatgcaaaatgcgatgagtcgtatgtgccccctctttacctaattgcggctcgcccgtctccgtctgatcaaatggacagccttcttctacgagctgctccaccaattgctttccacgacttacgatctcttgtaccgccctctcatcattgtgatcacagccggcagctaatgtgtcttgtacatgctgatgaactgaatcctgtgctgaaaaggcagcagcgattcctccttgtgcaagcatggaattactagaggaaaattgtttttttgtcatcatgataacttggcagctttctgaaatggtttttgcaaaggaaagcgctgcaatgcctgatcccaccacaatgacttttttgattgatgacaccttcgcccctcctatcatttacacctgtcttgacacatatcattacacaacactacaataaatacaagaaaaaattttctcataggagatggatggattggtttatttagattacgcagcttctacacctgtttcagaggaagcactgcatgtttttcagcagctaagtcaagattgctacgggaatgcaagcagtcttcatgatgcaggtggaagagcaaatgacatactgacttacagcagacaatcattcgctgccattcttgagggcgaaccagacggcatctactttacaagcggcggaacagaatccaaccttcttgcgattcaatcgattgcaaatggtctgccagcacacaggcagcatgtcatcacaacttctgtagagcacccttctgttcatcatgcggttagtagcttagagcgtcttggcgtgaaggtcacaatcattgaaccgaatcaagatgggatcatcactaaggacattctcaaagaagcattattgcctgaaacaggactagtatctattcagcatgctaattcagaaacagggattatccagccgcttgctgaattagcaccccttttaaaagaaaggcacatactttttcatacagatgccgtgcaaacattcggaaagattcgtgtgtccatcaaggagcttggggttgatgccgtttccatctctagccataaagtgtatgcacctaagggcgctggtgctgtctatatgggcgcacatgttgcttggaagcctttatattcaggtgcagttcaggaaaatggcttccgccttggaacagtgaacgttccatgcatcggtgcttttgctgctgcgagcgaacaattgatgcttaagctagatgagcagcatcaacagaatgagctgcttcgtgattattttcttcagcagctgaaaatgagacaacttcctgttcgtacacttcaaaacaatggcaatcgccgcatgctgcctcatattattggttgtttttttgaagggtttgaaggacaatatgtaatgttagcatgtaaccggcatgggatttgtatatcgactggaagcgcatgtgcttcaggttatcatcatccttcccccgctgtgaaggcattgcacatatcagatcgtgatgcccttcaattcattcgactatcatttggatcgaagtcatcaaaagaggacatcgatcagcttttgcatacatttgaacaattgcaaaaggagaagaaaggagcataagacgtggagcaagagaggaaactcattggcgaagagagaagaaacgccattttagagtggctgaaagaaacagatacaccgctcaccggaagttttttggctaaaaaggcggctgtctctcgacaagtcattgtacaagatatgtcactattaaaagcaaaaaacgaacccattattgccacaagtcaaggctatgtgtatatggcaccgcagcatgcgccagaaagagaaattgaacaaatcatcgcctgcaagcatgatcctgttcgcacagaagaggaactgaccttgattgtagactttggtgtgacagtgaaagatgtgatcatagagcaccctgtttacggtgaactaacggcctctattcgcgtcagtactcgcaagcaagtagctgatttcgttcatcacatttctaacacgggcgcctcctacttgtcagaactaacagacggcgtgcatttacatacactcacttcttacagtcaaaagcagcttgaccaagccattcaagcgctcgatgacgctggttttttaattaaagactaaaaaaatagtgtcctgcaagggacactatttttcattcgttagttcatatgtttggtagctgccgagcagtttgacctcacagccaatcgcttctaattcctgaatcgcgccagggacaaggacatcatccatttctttttctatatctataataaataaatagtgtccaagacctgtttttgtcggacgagattcaatttttgacaagttgagattccgccaagaaaaagcagataacacgcgatgcaatgcacctgattgatcatcctttggcagactgaccacaatggtcgtttttggcttcgatgagaacccagcattcattgggaacgacgccttaggatctttatgtaaaataacaaagcgtgtatgattgtgcggataatcatgaatgtctttttttgcaatcgttaaaccatacgtttgtgcggcaatttcattggcaatggccccagcagcctcatccggatgctcactgatatattttgctgcataacctgttgattctactggacgatgcggaatatctgggtactgctttttcagaaattgatgacactgggcaatcgcgtgcggatgtgattggatcacatctaatgtctcccagctttccgctcttgatgggtggacaagcaaatgctgccgaatcggtgctgtcatttcaccaacaatggacagcgcttcctcatgaattaaataatcaatcgttaagttcacagatccttcgagtgcattttcaagtggaacgaccgccaaatctacttcgccttttgacacagcatccatacattgcggaatcgttgcataggcacgctgcactgcatctgttggaaagcaagagcatacggccaaatgagtaaatgttgcctctggtccaaaataacctacagttaattgcttcatctgctatgatctctccttttacgccccagaacctagaatttcaactttttcgacaaattcaagttttcttaattgattcatgactgtattgatatcatctgccataccagccgtgctaatggatagggtgacattcgctcttccctgcagcggaatcgtttggtgaatggataacacattacagccagagtccgccacaatttgaagcagccttgacagagccccagaccgatcctcaaggtggaaaaacaatgtgatgatctgctctttcaccattgtataaaatggaaaaacagcatctctgtatttataaaaagcactgcggcttaaatccgcttgttgaacagcatcggcaactgaatccgcttttttgcgatcgagaagctttttgacttcaagcgtttttctcatcgcatctggaaggacatcctctcttactaaatagaacgtttcttctttcacctgttttctccccttttaaaaacgggagagcccatggactggaccctccttttgatcaatcaataaattcaaattcaaattcaagcagacgaatgatgtcgccgtcttttgcaccacgctcacgcaaggcatcatcgacacccattccgcgcagttgtctagagaatcgtttcacggactcatctcttgagaaatctgtcatcttaaacagtcgctcaagtgctttacccgttatgacaaacgtaccgtcaggatctcttgtgatctcaaatggcgcgtctccctcatcaaacctgtacatcacgcggttatcagacagttcctcttcattatagagcgggaattccggtgttgtttcaagctgattggcgatttcaaataaaagctcacgaagcccttctcttgtgatcgcactaattgggaacactttatagtcatccgttaatttttctttaaatgccgctagattgtcagctgcttctggcatgtccattttgttcgctacaatgatttgtggacgctcagtcaatctcatattgtattgctcaagctcttcattaatcgtcacataatcttcgtacgggtcacgcccttcaagtgctgacatatcaatgacatggacaataacccgtgtccgctcaatgtggcgtaaaaattgatgacctaagccaacgccttcgtgcgctccttcgatcagtcctggcagatccgccatgacgaagcttcggttatcatctgtttcgacaactcctaggttcggcacaagcgttgtgaaatgataatccgcaattttcggtttcgcagaagagacaattgaaagcagtgtcgacttcccgacacttgggaaaccaacaagtccaacatctgcaagtacttttagttctaagatgacgtcacgttcttttcccggctcaccgttttcagagagctgcggtgcagggtttgccggtgttgcgaaacgtgaatttccacgtccgcctcgtccgccttttgcaatgactgcccgctgtccatgctctgttaagtcagcgagtacttgttccgtctctgcatctgtcacgaccgtaccgggcggaactttgacaatcatttcttccgcatttcggccatgctggtttttactcattccatgctcgccgcgatccgccttaaaatggcgcttataacgaaagtccatcaacgttctgagtccttcgtctacttcaaatacaacatctgcaccatttccgccgtcgccgccagctggcccgccttttggcacatatttttcacgacggaacgccaccataccgtttccgccgtcaccgcctttaacatacactttaacctgatctacaaacataacttcctccgtttctctgcatcacatatctcgttcttgcctcaaacaaagctcaatcatggactcatgacttgtcacatgaaattgagctacactcatacatggatagtttgcgtcatgaaacgcatttaacgcatccaaacttgttaattttcctttgaaatcaaaatataagaccacatcattctcttcttgatctgtttggaacgtgaccgttaaatgattttcagttttttggcaaactgattgatcgaatatcgaaaacaactcctgtgataccgttagcagctgcgattcatatgctgataagtctcgggtttcaccaagcacttcatattctagggtgataaaatgcgactcccaattaaatgttagaaagtaataggccaattggggaatttttaaatttgagagtttggattcatgctgtgcttcaatgaccatttcttctataatttcaaacacccggtcatatttttctaatgtcaagttgcccttgatcagctgcaatttattcatccagtcgtgtcttgaacgactgagcagatagatcaattcatttgttaatgcaacgtgagttaatttttcgttttgtttacttggtatctcttccattatcgcactcccaatcgtttggtctctcttttaggagtcttatcatcactatgtctccctgaattataacagagaagacagcatagaaaaacactagttatgtgaggaaaggttgttttttctgatctataggagaaaatgaggcaaagtcagcaaacgttctttgatatttatggagtgcatcttcttttatcatcttcgatactacttgtaaaaagtgaaaaaaactccagtcaatgaccggagtttttagcaattattgtgccgcaggatatacgctcacttttttacggtcacgaccgaaacgttcgaatttaaccgttccgtcgattttagcgaaaagagtgtcgtcgcctccgcgtccaacgttttcacctggatagattttcgttccacgttgacgataaaggatagaaccaccagttacgaattgaccatcagcacgtttagcgcctaaacgtttagactcagagtcacgtccgttctttgtagaacctaccccttttttagatgcgaaaaattgaagatctaatctaagcatgaagttcacctcctatttttttgtagatattctcacataatcgtgataatctcgttcgattgtctctaaggaaacgaccatgccttctaaaagcagctgggctttttcaaaggatactggatctgtatcagctggcaattcaaaagagaaatagccgccttcttcaccaatatcgagcagtggatccattcctgtcagtgcaataattgaattgactgagccgaaaacaacagcagatacacctgcacaaacgagatcctgacctttttcagcaaactcggcatgtccagtcatctgaaaagacgtaatgctttcatctgctgccgaccgagtaatggttgctttgatcatatcactcacacgccttaagcgttgattttttcgataacaactttagtgtaaggttgacgatgaccttgtttcttgtggttgtttttcttcggtttgtacttgaacacagtaattttcttaccgcgaccttgtttttcaactttagccgttactgttgctccagcaactgaagggttacccactttgacagtgtctccgccgacaaacaatacgttttcaaaagttactgtttcacctgcttcagcagctagtttttcaacataaacagtttgaccttcttcaacttttacttgtttaccaccagtttcgataattgcgtacatctctgcacctcctaataaactcagactcgccgaatacagggggccttaggctctttacacctgcttcgcgcggttgtagcacgggtgctacatatccataacattaaaaaatatatcaaattagacgcagaatgtcaacgtattttcatcactagtacggcaaaaggagctcttccattgaggaggtggttcttcgatctgaaaaatacgcatggagcagttcattttcgtcaagctggctcattttcacgccatctctttcaataataatcggatgcttacagcctctttggaatcgcgccattacttcatatactttttcctcagcgctcgctctcagcggaataagcttttctaccttttgctcttttttaccgtaatagcgttctagtaaaaagcggaccctgacgtaatgccgctgccggtgttccattacgagtgaataggctaaaaaagtgagcagcacccagccgttgaattgcagcggcgcaaacaaaagcaaccctgcagtcaatagaacgaaaaagacaagtgagccttttatggcaagggtatgtgcacgttggaaagggtaatatgctgataagagcaaaaagaataatttcccgccatcaagcggccaaataggcaaaagattcacaaggaaaatcgccatattataaaaagtgaacatcgtaaaaatgtcgtgcgaaataagagaagtttccatgaaaagccatgccataagctggagcggtacatgctggagcggcccgcataaaatgaccgccaactcttcctttagcggacggttcccatgctcttctacttctaccgctccgccaaatggcagtaaaaaaatccgccgaatgcgccaatgataatagcaagcagccgctgcatgtccaagctcatggacaaagacgatgatgagcagacaaagcagcggcttgatttgaccagagagaatcgcaaacgccatcacaatccacagcagcggatgaatgtgaattttcgtcagcatgaccagccatctattcaaaggtcatcacctgaataggatcgataaactgttcattttgcttaatggcaaagtaatacgtgccctttccttgatcatcaagtgagatctggccaattttctcacccttatcgacaaaatcgtataaggccacatcggcttcctttaattgaccgtaccagctatagctgttatccgcatgctgcacgaccactgtaagccctgtgtcacttttcttttttacctctaccacatagccttctttcatactgtcaatggcttcagccgatgtttcgactttgactcctgctccattttgcgtaaaggattcctgcacttttccagaagcaggtacagccagttcttggttcgcttgtacatctttttggtctgcctttttgtcggttaaaaaggcaagggggtttccaactgttttctcaaaccagtgattggcagcagcaaattgaaaatcttgctcaaaggtctgcgtaatgatcggcttcagctgctgaaacggccctgcctgacccttaaatgaaatggctgcaatcaacacaagggacgcagataataaacatttaagcacaaaagcattggggttaaataacggatgccgatatttcttcggctggtgagacgacgactcaaaggaagacgaccctgaatgcttttcttcctctgtcagcatgacccatggagggatatcttcttttttcttgaaagtcgtcttcttaggtggagcagctggctgcttcgttttgcggcgctgcgcgattttctttcggtactcgtccactcttttcatgagatcaccctttacatacaaacagtttgtacattttatgtgacgacctcatctgatatgcaacaaaaagaccgattctcatcgaatcggtctcatcttacttgaatgcttatgctcttacaccaaaaaatgctttcagcttcgcaaacattcctttgttttcatcttcaaatgattgaagcggaacagattcgcctagtacacggcgggcgatattacgatacgcaatcgatactttgtttttagcatccatgacaatcggttcaccattgtttgaagccttaatcacgtcatcatcatctgcgacaatgccaagaaggtcaatcgataagtgatgtacaacttcatccacatccattgaatcgccacttttcgccatgtgtgtacgaatacggttgacaatcaaacgaggtggttcgatatcttcttgttctaacaagccgatgatacggtcagcatctctcacagctgagatctcaggcgtcgtcacgacaattgccttatctgcaccagatacagcatttttaaagccttgctcaattccagcagggcaatcaatgacgacataatcaaagtcttgtttcaatgattgaattaattctttgatctgctccggctctacagccgttttatcgcttgtttgagcagcgggtaaaagatacaaaagatcctcgaaacgcttatcttttacaagcgcttggtgaattttacatcttccttctactacatcgactagatcataaataatgcggttctcaagccccatcacgacatctagattccgaaggccaatatcggtatccactagacacacttttttcccttgaattgctagtgctgtgcctaagtttgcagatgttgttgttttgccaacgccgccttttcctgaggtaatcacaatagcctcgcccaatttcacattcctccctcaagccttgtcagattaggtcttatatgagccaattgctgcaggcgttcaatgatcatgttgccatctatatctaaataagcacattccatttcgtttccatcttctttttgatctggtgcacggttaaacacttgtgcgatgcgaagctgagttggaatcatacgagatgccgcaatgacagcttgtttgttcccattacatccagcatgtgctacgccttttaatgcgccgagcacaaaaatatttccccctgcacgaatcgttccgccaggattgacatctcctattaataagaggtctccttcgacatacagcacctgtccagagcgcacaattttggctacagaggtaatttcggcctctgcttttaatcgtctcgcctcttcagttgacatgacgtcactttcaatggagtgaatgacgagatgttcattttcagagaccgcttcagtcaaacgcatttcctgatcctctgttaaataccgaaaaccaagcttaatatgcacattaaccttatgcccttctctgccatctgtatattgctcaagtaaaagaacctctcgcaagccagaaagaaggtcatcaaacgaacagtcatcatttaactgtaatgttaatccgttttttgtaccttttatcgtcacatattgctgtttttgagttttcaagatgctcacctcaacaacatactcatttcgccgtaattggacaaactcctgcttttattcgtcgatcagtccttgtttcatattgatgaaaaagagcctaagcggcacaacaagtatgagagacgcagcagtatttaaaagaatcgttggaataaagcgttcgatgacatacgtattaaacggcataattcctggttgaattgtcgcttgaacgccgtatacataaaactccatcacggaaacagcaataatcgacagaaagacgaccactaacatattcgtttgcagaactttaaaggctttcgctagcaaatagcagagcgctccatagccaaacatatgaacaccaagtatgcctgtatacgaaatatcatataaaagtccaaagataaaaccgaaaatcacaccatatttttgattcacaaaagcagtcataaatacaagtgcgagtaagatgaaatgaggagctaaaatttgattgtctgaaacaaatgggagcttcactagatcgacaaaaatactgtcaaatacgaagataaacaacatgacgaaagcaagaaggacacgtctcacgagccttcctccttcgtcaattcagatgcatctgccgtacttgagctgcgattcaccacaatcacgcggtctaaattgttgagttcagccgctggttctacataaataatttttgtcaggccgtaatgatctggttcgatttcactcaccttaccaatcgtcaagccttgcgggaatacgccccctgctccagatgtttcaacaagatctccttttttgacatctccatctgcatcagatttcagaatattcattgtcagcatttttttcttactgtcataaccgttaataattccgttgagttcttctttgccctttttcgcaaaaattttcgttgaaattctattattttggtccgtagagcttagcaaccttacagttgaagtaaaattgttgagcttatcactttcaattttcccaattaacgcaccactctcatttgtgaccgccatatctttgtcaacgccttgttttttccctttatcaatcatcacaaagctatcccaaagggacgggtttctcgcgataaccgttgatagaattggcgtataatcacgaatagagttcacatatccgagctgcttgcgaagctttttgttctcatcttctagctcttgaagtttcgcctcatattgagtttgtccatcaagtttttttcgaagacgctcgttttcatcatatgtgttctttaaatcttgtacgttcccataaataccggcaataaattgtgatggtttatgaaagacaccttgaaaaaagcctgtcgtatcccccactaatttttccggccatgaagcacctctgccgcttttcactgaaaaaccaatcatggccaccagtacgatgacacagacaaggagcaacattaatcttttattcataaaaaactgcggcatgtcttacacctctttatttacgcccgattatctttagattttcctttgaacaaatgaatatgctctagtgcttttcctgtaccgattgccacacagtcaagcgggtcttcagcaataatgactggcatcttcgtttcatcactaatgactttgtcaagattacgaagcaatgcaccgccgccagttaaaacgattccgcggtccataatatctgctgccagctcaggcggggttttttcaagtgtcattttcaccgcatcgacaattgtttccaccgtatcgcgaagcgcttttgcaatctcatctgccgtaatagagatcgtttttggcagacctgttaaaaggtcacggcctcgaatatccatctcatcatgtacatcaggctgcgcagaaccgatttccattttaatggcttctgacgtacggtcaccgatcatcaggttatacgttttacggatgtagctgctgatcgcatcatccatttcatctcctgccacgcggatcgactgtgaagtcacaatgccgccaagagaaataatggctacctctgttgtaccgccgccaatgtccacaaccatacttcctgttggctcccatacaggcaggttagcaccgatcgccgcagcaaatggttcttcaatcgggtatgcgtcacgtgctccagcttgtcttgtcgcatcaatgactgcacgctcttctacagctgtaataccagatggtacacataccatcacgtaaggtttgcgagcaaaaagccctttgccttttaatgcttgattaatgtaatatttcatcattgttgctgtcgtctcgtaatctgcaatgactccgtctttcatcgggcgtagtgccacaacattaccaggtgtacggccaatcatgtttctagcgtcatttccgaccgccactatagacttcgtatcagtttccaaagctacgaccgaaggttctcttacaacaatgccttttcctttaataaaaacaagcgtattcgctgttccaagatctattccaaggtcttttgtaccaattccaaacatatgtatgtatcttcctttcttaaaccaaaattccctttagggaaaaactcataaactctattatatcgtaaaacattgaaaaaaaaagtgttacaaataccctttttccttcaaactcacaaatttttgatcacctatgacaagatgatcaagcagctgtattccaatcagctttccacattcaaaaagtcgctgtgtaacttcaatatcttccctgctgggcgtcggatctccagatggatggttgtgcacacatataaatgaagccgccgaacgtttaaaggcctctttgaaaatttcacgcgggtgaacgatcgatgaattcaggcttccaataaacacggtatgtttatgaagaacttgatttttggtattgagataaagacaaacgaaattttcctgtgtcaaaaatctcatatcttccatcacaaagttcgctccgtcttctggtgtgcggatcacatagcggttatccgtcgtttgatggtgtaatctagtgccgagttctaaagcagctaaaagagaaatcgccttcgcctttccaactcctcggatcttcgacatttcttcaattgaggcttcttttacagagcgaagaccgccaaatgtttgcagaagtcttgcggaaatttggagaactgattctttttttgtgcctgttcttagaaggatcgcaacaagttcatgatttgacaaactgctgggcccgtatttgataaatcgttctctcggtttttcatcatgagggaaatgctttagcagcatagggaaatcgttcaggatgaccactccttttagaattccttcctgtcttcaaaaaggggtgattccaaaggtttcaagcactctgactgttttcgcaataggtagacctacaacggaaaaataatcaccatctattttttgaacaaacagtgcgcctttcccttgaatgccatagcttcccgctttatcaaggggctcgcccgtattgatatagcgatctatttcattttgagtcagcgtccaaaatgtcacttctgtctgttcataaaatgtttcttttctattctctgactgaaccgtgacacccgtcaagacttgatgtgtctttcctgataataattgaagcatgaaagccgcttctttcttatcttttggtttcccaagacatttgccgtcaattgcaacaattgtatctgcaccaatgatcacagctttaggatttaatctttgaatatcatttgctttttgttctgccaaccattggacgttctcagcaggagaaaggtttcgatttatttcttcttttaaatgacttgcttgaatgtcataagaaaaccctgctagatcaagcaattcttttcttctaggtgattgagatgcgagaatcaattggttcatgtttgttcatcctttcagggtttagcctaagaagtaagatacccattcatcctagcaaatgtacatcttaccgacaatctacgaaaattcatttttcatgtaccttcatcattatgttggatgtaaaagaaaaaaactagtcattttttgactagtttcgtttctaaaaaaatgattttacgtatttaattgatcaagcagtgcctgctgagatttccagccgttttcagcagttgggtcatttaatagctgcacagcttttagcaaactgcttttagccgatgcgtccgctgttttggcactttcaagctcagaaaccagctgcgtgacttccttttgatccacttcatcgccggcaatcactttagaggataatacagatgccttttctattaaactagtcagctcatccggtacttgaaatgagagctcctttcctccccacgcctcaaagtgctgatcgatcagcttcttccctacagcgcttgtcattccctgctctgtcgcaagcccagcaatgacataatatccatcatccattgagacctttttccctgcataccctgcatcttttaaactgccaactaagtcatctgctcctttttcagaagaaaatttcccagcctgtacaacaaaggttgataaactgccagaggcacttttttcatcgttgttctcttttgagtcatccgtagtacctgctttcggcgcatccccgccggctttcatcgatgattgatttccagatccagatgccgagacactgatatctcctcctgatggacttggtgtaccatcttgacttaaactaagcgcaaacaccccaaggcctgtcccaagaaccaccgcaaacacaatcgttgtcatcactctcttgaaggggccgcggtttttaccaaacttctgatcaaaggagccttttttcttttgataaggcgtgacgacctttggatcagaatgataaatatgatcagctgcatcatcccactggaaatcttcttctttcggtttagacgaatcttcctgagaagccgctgtctcctgttccgactgcctcttttcctcccaattcgaaaacgtcacttgatcttcctgcttttttggcggctgatgatcatcttcatgcagcatttcttccttgccattaatattgaccttgagcccttgtttttttgcctgcctctttttcactgtcattccccgctttctgacatgtttgtaagaaagacctttctgtccaatgaatcagcgcgaatttaacccgtccttctttctgtttcacactttaacatagcagtaaaaaaaaagaacaagacttttgtcggcagggcaaaaaagtgttcgccaattttttcaccccttcgactagccaaatagaaacaagacaggagcaccaaagagatacagccaaaaagaaaaagcgatcgcaggaacaaaggggaatggctcgtctaattgaaaggaaaagaccttcgcatagaccattccagcgatacatgagagaaaaagcatgagaaggaacggcttgaatccaaagcaaaacgcaagcaaactgaacagcttcatatcagctccgcccatgctatttggcttaaaataatctagactagaaaacaaaagaatgcaaaaaatcagagaagccgctccttcccaccaaataaggagcggttccagcgtgcggtatatgacgaaaagagggaaaaagaagagaaacagctcgttcggcaccctcatatagagaagatcactcacgacagcaatcacgaataaactacaaagaatcacaaggaaaagaccttcaaacgaaaaaccagcgatcctataaacgaacaaaaaaagaccgcctgtcagcagctcaaccgttggatatagccaagacaaccgagtgccgcaatgtttacaagaccccctccatacaacataagaaacgagcgggatcatctcatgcagggaaagcggctgtttacagactgtgcagtgagagcgagggaagagaatagaccgcttcactggcagcctttcgccaacgagatgaaagaacgaccccatcgtgatgcctgcaagaaacagaaaaatctcaatcatacatggtgctccttccgggaataagatagaccggattttaccatgaccctatccactaaagcatctagtgaaaatatgattttcccccttttctacatataaaaagaaaaagacgcaggaggcatcaaagccatttgcgtcttttcgttacccgatcatacgatttcgtatatctgaaataaaataaagagaacctgtcacaaggagcaccgctaaaggatcatcactctttttctgaatccattcaagcactgcacgagggtcatcaccatatgattttgcctctaactgactgcacgcataaagtttttcagctgattccgctcttggaaagtcaaacgaaacaaaatgaatagatgaactaacagcttcaagcttttgaatcatttgcttgtacggcttatcctttaaagcactaaaacaaacatgcacttgtttaccagaaaaatgagcttgtaccgtttcaattaaacggtcgattccctcttcattatgagcgccgtctaaataaactgctggatggtctttgactttttcaaatcttccagcccaaactgcattccgaataccttcatatacctgttcttctgtcacactaatatagccttcttgctccagccattcaatgagtagaacggcaagagaagcattttgccgttgatgcgttccaattaatcctgtttcaagctgcggatactgcctttttgatgtgtgtaacgtaaaccgttcgcctgtttctgttggctgctgctcaccgaaggtacaagtatgctgtaatgagatgcattccgcattcttttcttttgcgatgttttgaatgaccccaagtgcttccggttgatgaacagcagtgatcatcggaatattctctttgataatgcccgctttttcagatgcaatctgttcaagtttgtcacctaaaattgccatatgatcatgaccaattgacgtaatcgctgttaaaataggtacggcaacatttgttgaatcaagtcttccgccaagccctgtctctaataggacaaagtctacttggtgcacatcggcaaaataagcaaatgcacatgcggtaatgatttcaaattctgttgctgcgccaagctcggtttgatctaattcatcaacaaaaggcttgatcttattcaccaaactcagccattcttcatcctgtataggcgctccgttcacgctgattcgttcattgaacgttaaaataaacggggaggtgaaggttccgaccgaatagcctgcagcctgtaaaacggaacgagtaaacgcaatggttgaaccttttccatttgtccctgcaacatgcaccgcttttatgcgttgttccggatggcctagtctgttcatcagccacttcattctttcaagacccggttttacaccaaaggccagtctactgtgaatccactcaatggcttcatgataggttgtaaacaatgtcatctctcatttcatacgaaattttcaaaaaagacgactccattttgttaggagccgtcttttcaactttatgctttcagctcttcaatccgcttttgaacagcttcgcgttttgcgacataatcacgttctttcgcacgctcttcttctacgacactttcaggcgcttttttcataaagccttcgttgccaagctttttctggacgcgttctacttcttttgtcagcttatcaaactctttttgcagacgagcaatttcctcatctaagttaattaagccttcaagcggcagaatgagctctgctccagaaataacagccgtcatcgctttatcactagctgggacatctgtgccaatttcaagaacacttgggttcgtgaagcgctcaatatatgaacgattcttctctaaacgttcttgtacatcagatgtggatgctttgatgtaaagttcgacttgtttgctcattggtgtgtttacttcactgcgaatgttacgaacagagcgaatgagttcaacaagcagtttcatgtcagcagaagcttgatcatttgaaagctccggcttcacctcaggccaagctgctacagtaatggactcaccttcatgcggaagatgctgccagatttcttctgttaagaacggcataaacggatgaagaagtctcatcgtttgatctaatacgtacgcaaggatcgaacgagtcgtttttttcgctgcttcatcttcaccataaagtggaagcttcgccatctcaatgtaccaatcacagaaatcatcccaaatgaagttgtataaatgtctgcccacttcaccgaattcatacttgtcagctagctgtgtgacactttcaatcgtttcatttaagcgggttaaaatccattggtcagcgactgatttttctccagtcaaatcaagttcatcatacgttaagccatccatgttcattaaagcaaaacgcgatgcgttccaaattttgttcgcaaagttccaagtggattcaaccttttcaaagctaaagcgaagatcctgacctggtgagcttccagtcgctaagaaatatcttaatgaatctgcaccgtattgatcaatgacctccattggatcaattccgttgccgagcgacttactcattttacgtccttgttcgtcgcggatcagtccatgaatcagaacgtctttgaacggtttttctcctgtgaattcaagaccctggaagatcatgcgagagacccagaagaaaatgatgtcatagcctgtaacaagcaggtttgttggatagtagcgcttgaagtcttcactgtctgcatctggccagcccattgtagagaaaggccaaagcgctgaactaaaccatgtatcaagcacatcgttatcctgttcccagttctccagatcttctggcgcttccagtccaacatatacttctttcgtttctttatgataccaagccggaatgcggtgtccccaccatagctgacgagaaatacaccagtcacggatattttccatccagtgtaaatacgtcttttcaaagcggtctggaacaaattgaacttggtcgtccccattttgaaggttgatggcttcgtctgccagcggctgcatttttacaaaccattgagtagataaataaggctcaacgacagctccgcttcgctcactatgaccaactgaatgcatgtggtcctcaattttgaacaaaataccctcttcttgtaaatctttcacaagctgtttacggcattcgaagcggtccattcctttgtattgcagtgcatttgcattcattgtgccatcttcattcatgacaagaatacgctctagctcatggcggtttccaagctcaaagtcattcgggtcatgggcaggtgtaattttcacagctcctgaaccaaactccatatcgacatagtcatcaccaacgattggaatctctcggcctgtaattggtaagaccactgtttttccaatcaaatgctgatagcgttcgtcatcagggtgcacggcaacggctgtatccccaagcatggtttcaggtcttgtcgtcgcaatttcaattgaacccgtgccatctgaaagcgggtatctcaagtgataaaacgcaccttgaacatctttataaatgacttcaatatcagaaagtgccgttttcgtcgctggatcccagttaatgatgtactctccgcgatagataagtcctttttcatacaattggacaaacacttggcgtaccgctttattcagaccttcatctaatgtaaaacgttcacgtgaataatcaagaccaagtcccattttcgcccactggctgcgaataaagtccgcatattcttctttccatttccacgtttcttccacaaatttctcccggccaaggtcataacggctcacgccttcttcgcgaagctttgcctctacctttgcttgggtcgcaataccggcatggtccattcctggaagccatagaacatcatagccctgcatccgtttcatacgcgtcacaatatcttgaagtgtagaatcccatgcatgcccaaggtgcagttttcctgtcacgtttggtggaggaatgacgactgtatatggatctttcgttttgtcattttgtgcttcgaagaatttcccttcaagccagtacgtatagcggtctttttcaatcgcatttggatcgtactttgttggcatttcttgattatttgttcccatttgtgtaacctccacattttttcggctgatgaaacataaaaaaagcctttccatccttataaaaggacgaaaaagctttttcgcggtaccaccttttttcatggaacacatagacgtgtcccatacactctaaaggataacggggttctcccgaatttctctacttgttcattcaagaaattaagctcacaggcgaccttccaaacaagtacatcctaggaaacctttcagctcatggtctccctctctttagggtcttgctcgtactcttcctgatccacgcttacgatatatcacgttcatcagcacatactcatcttttatttatattactaaatgccttttgttttcgtcaatcatcttttccgcttttcttcttctttatacaaattgggcaggcaccctttgccctattacccatatgataataacaaaatgaagaaggagggcgtttgctttgaagaagatcaatccttacacacttcccccctggctgagacaaattcgggcagtggcctcccaagtcgttctcccgattgcgatatttcaagggtttcgtacgatcattttccccacgacatttgacgtcctcatcctaggtattttgatttttctcgcctgcgcctttcaccttgattggttttaaactcgcgcttatgtaacggccaatatgaacacaaaataacctcgtcattccgctgatgacgaggcactttgttcttcttcaagccgtctagcctgctcaatctcatgaatcttcatgacgatcggctctgaatttttcatctgccaatacgctcttaacagccgctgacagctctccatttcatcctgcccgcctgcttcataggcttttactgtatcaaacagaccttgcggataagcaaggtaactaagaaacaaatgcagctcttcctcccgaagaggatttcctttttggtacgtataaaacaaggaagtgcattcaggacaagacgtaggataggttttgaatgtccgaaagtaaaaggttagaaggtcataaatgggggcggcttttttagaccgctcaaaattggtgaaatgtcctgtgcccacatcattatacaaaaagtgatgaatcgacagctgcccatgatttaacacaacacgtgttgtctcttgatctttcatttcttcatgccaatcttctaatcgttcaagcgcaaattcgctggcagacatcgcctctgaaaaatacatcgcagcagccagctcaaatggtgacatataccaagtctgctctgcccgctctatgaatcgttcatacatgtctttctctgtttcccatttggtcttgatttgtgtgtagtgcgcttctatctcttgctctgtgatatccatcatcacttcagtccgcttatgaagtcttgcaatctcttgaaataaatattcatgtttatcgtcctgctcttctctcttttcattcgtcagccacggcatgagatagtatgcgtactggctttctcgatgacttgagaaaaaagaaccgctcttcgtccgataaatcggcacaaaagagcgatagccctttgattctagttcaagcatttgctctgtaaactgcatatgtcgactggcttttactcgctttagggcaaatatgccctgctttgtatatactttgacaacagcaggactgacaggttcaatgtattccgcctcaagcccgtattcgtataggatagattggatttcatccacgttcactcaccacattttctcggtcggtcatcgcttgttatgcattgcttttttgatattcaggaatataaagaatctgcccttcttcaagctccgcatcaaccgataatgagtttgtgcgaaggagctgctgcacattcaactgatatcgctcacaaataagatcgaccgtatcttcttgctgaactatacatattttcatgcgagaaaaatcttcctcctcctgcttagcaaatagctttgttaaataaagagagttctcactgccagacgtttctctctcgtcatattcaggctcctcttcttcttgagctgactcatatacttttggtgcttctcgttcatataaccgtccgagctggttcgtatcatcctgttcctgttcctcttgctcctcttctacgtggtaagtgggtgattcaaatattggatacggctgaaccgtttcttccagctcttcggctgcttccggatcttttctcacttccacctcaaagaacgtatcttcccgcttctcttcttctaagagcttaggcggttcaaaaaatggtggttcttgcacctgagcttcaggtaaggagcgataaccaagcgccacttcttcttggctctccgtttcctccagttcttccgattcttccggttcttcggtttctccctcttcttccctactcaccagctctatctcaatttcttcttcctgttcttcttgctgttcttcttgctcggcgcgtgtgtcatgctgtaatacagcctgttcctcatattcttggctctccgtttcctccagttcttccgattcttccagttcttcggtttctccctcttcttccctactcaccagctctatctcaatttcttcttcccgttcttcttcctgttcttcttgctcggcgcgtgtatcatgctgtaatacagcctgttcctcatagacctcacgttcattgccttgcagctcttcttgttcctcatgctctggctgcagctgataattgtaggtcacatcgccatattcttcttcaggacgatggacaaattcatacggctcctctacctctacaggcgcttgaggcattttctcgtctaatagaccctcaatcgccagatcagcttgaatggtgagcaaacgattttctgtcagctggtaatcaaacgcatcaataaacacaaacacatcatttaaatgactgattttattcttagggatggtgatatcaaccgggaattgatgcagaagctccgccgttccgtcttctcttaccttcacctcatcagcttccctgtatgatgcataggaactcaattcacccaatagctcctcttgatttatgttgtattctcctgttagctcgagtgaacctctaatcgaaacataatcattcacttcttgaacgagaatgtcaggatcgagagaaattgacagcagctcactgacttcctgtccgcttttgaaataaatggattcttctaccgaaaactgtaatcgattgttttgagacaagtcggtgtcctcctttcatctaatccttcaaaataaaattagatgtcaatacagatgtatgtgagaggcagtgaaaatatgattggttttcagcaacacaaaaaagccgatatgtccccataccggctttcgtttatcgacgcagtttttgaaataccttttccactgtctcaatcgtatattcgatgtcttcatctgtatgagctgttgacaggaacagtccttcgaattgagaaggaggaaggaagatgccgcgatccgccatttccttgtaaaattcagcgaataaagcgagatcagcggtttttgctttgtcataattgaccacttcttcatttgtaaagaagaatccaatcatcgaacccgcacggttaaacgttaatggaattccgtgtactttcgccgcttttgaaatgccttcttccagccggtctccttttcgtctaaactcttcataagactcaggtgtcagctgttttaaggtttctaagcctgctgtcatcgcaagagggttaccagataacgttcctgcttgataaattggaccgcttggtgcaatttgtctcatgatatccgctcttccgccataagcaccgaccgggagaccgcctccgatcactttaccaaggcacgtcagatcaggtgtaatgccaaaatagccttgcgcgcagtgataatccacacggaagccagtcatgacctcatcaaaaatgagtaaagctccgtattgctccgtgatgtctctcagcccttgtaagaaaccttcttgcggaggaacaacccccatatttcctgcaaccggctcgacaatgacacctgcaatatcgtctccaaactcctgaaaagcaacttgaatgctctctaaatcattgtacggcactgtgatcgtgttgcttgcagtcccttcaggtacacctgggctatctggaagccctagcgttgcgacacctgaacccgctttaatgagcaaagaatcgccgtggccatgatagcagccttcaaatttcacaattttatttctgcctgtaaagccgcgagctagacgaagtgcactcatggtcgcctctgtaccagagctgaccatacgaatgacttcaatggaaggaactcgctctgatacaagcttagctaattcattttcaactaacgtggaagcaccaaagcttgtcccctgttccgcaactcgttgaatactttcaaccacacggtcattcgtatgccctaaaattagcggtccccatgataagacataatcgatgtattcatttccatcaatatcatatatcttggcgcctttgcctcgttccataaaaatcgggtctgtgttaactgatttaaatgcacgcacagggctgttgacaccaccaggcattaaatgctgcgcttcttcaaatgcttgctttgatttttcatagctacgtcccatttcaacgtcctcctgtctatccgttctttattctgagagccatttggctgcatcttttgcatgatacgtaatgatgagctctgctcctgcacgtttcatgcttgtcagcatttcaagaacaagctctttttcagaaatccagccattttgagcagcggctttgaccattgcatattctccgctcacattgtaagcaacaacagggagtgtaaattcatttttgacatcacgcataatatctaaataagaaagggatggtttgacaatgaggaaatcagccccctcttctacatcagactgcgcttctctgagtgcctctaaacggtttgcagggtccatttggtatgttttacgatctccaaactgcggtgtgctatgcgccgcgtcacgaaacgggccgtaaaaagcacttgcatatttcacagcatatgacatgacaggtacatgaataaagccagcttcatcaagtgcctcacgaatggccacaacaaatccatccatcatattggaaggagcaatgatatctgcacctgcgcgcgcttggctaacagctgttttcgctaaaagctgaagagattcatcatttaaaatttcaccatcttcaacgatgccgcaatgtccatgatctgtatattggcataagcaagtgtctgcaatgaccacaagttctgggaaatgctttttgatctcaagcgtcgctctttgaacaatgccatggtcgtgatacgcctcactgcccacatggtctttatgatctggaacaccaaatacaataattgatttgatgcctaggtcgacaagttcttggacttcttcttttacaaggtccactgaaatgtgataaacacccggcattgaagggacttcttttcggacattttctccctctacaaaaaagatcggataaatgaaatcagatggtcttaaaaaggtttctctgactaattctctcattcctgcgcttgtccgcagtctgcggtgtctgttaaatttcatcattggttcaacttcctttcagataaacggcacatcaattcaagcattccgtctaccgtataagtatctggggtttcagaagaaatcccgtattgaagcagtgcctcttttgtcagaggaccgatcgtcacaaaacaggtgccagaagcagccagcttcgctgcatctgcctccatggcatgcataaatgaatggacagtggatgagctcgtaaatgtaataaaatcaaatgattgcttcgtcatcgccgttttgagagcggcaataccttcctcatccttgacggtttcatataaaatccattcctttacttctatgccaagcggaatgagggttttcttcacgacatctcgagacaggtgtccttttgctacaaacacacgctctccccgacgcacatggtcaagtaacgcatctgcgagctcttccgctatgaatcgttctggtaccacatccaccttcaagccgtgctgctcaagataggcagaggttttctcacctacagcagccactttcaaatgcgataaactcttatgtaaatgatggtcctttatgtagctcagaaaaaaagacgcaccattcacactcgtgaaaacaagccattggctattttctaagtcctttaaaaaggcctgcgctttttcttttgtgagcgtaggctcaaaccgaataagagaggttaaaacagcatggccgttcagctcttcaatcttttgctgaaacacacccgcttgacgttcatttcgagtgacaagcaccgtctgtccgtgaagcgatttgcctatggtcattgggaggacagatcctttttcaccttgtcgattaaatcctttgctcccttatcagccatctgcttcgcacatgctgtcccaattgcctcagggtcagtgcctgatacagtttctcgaataatcgtgtgtccgtcagcagatgccacaagacccgtgagttcaatttcatcacgctcattcatcgttgcatagccagcgatcggcacctgacagctgccatccatttgtttgaggaaggctctttcagcgagaaccgttttcttcgtatattcattcgtaaattgagcgaggagctgcaatagctcttcatcatccccgcggcactcaatcgacaaagcgccttggccaacggcgggcaggcaagtctcaggagataaaaattccgacacaacctctttgctccatcccattctggacagcccagcagccgctagaataatggcatcatattcttcatttttcagcttttccaatcttgtatcaatgtttcctcgaatccatttaatttcaagatctggtctttcctgaagaagctgggcactgcgccgtaagctgcttgttcccacaatagcacccttcggcagttcatgaagacgcagatgatccttcgaaataagagcgtcccttacatcttcacgctcaggaatacagccgatgactaaaccttcaggaagagcagccggcatatccttcatactgtgaaccgccatatcgatgtcatgattcagcatcgcctgttcaatttctttgacaaacagtccttttccgccaacctttgataaggtcacatctaaaatttgatcaccctttgtcacaatctcttttatttcaaaagaataagaagggtttagttcagacagcttttgaataacccattttgtttgtgtaattgcaagcttacttcttctagaacctactttaattgtacgcaatacgtcttcctcccgacaatgccctttagactcatcattatttattgaaaccaatgaaaggttgataagctaccaagcagaaaataattgatcatcagcacaatgaatgaaccgacattccacagtgccacgattttgccctgcatatttctcaccaatctgatatataagtaaaagccgtataaaaacagcataataaacgaaccaagcacctttgcatctgtccagtacaacgtatcatacgaaatatatgcccaaatgatgccaagaatcaaactaagcaagagcattggcacaccaataatgtttaatacgtacgccatatgatcaagcttcgataaatcttcaattctcagaagccattttccccattttttctttttcagcaaacgatattgaaagagatagagaagggagaaagcaaatgaaagtgaaaaagcaccgtatgataaaatcgccatcgtaatatgaatcacaagcagttcactcgtcagcttccccgttagttctgctgagtggagatcagatggtgtaaaggtgtgaatcgccatcatggaaaaaccgatgacatttgtaaaaaagacaataaattcaacacgcaatacttttgtgagaacaagtgaaagtgtcacaagcacccacgtataaaaatataaaccctctgctacattcaacacagggaatcggtctgtttccatcataatatagaacatgtagactgtttgcagcagccagacaatagaaagcaaccagaaagccatttttccagccttccggttgtgttgaagaaaatctatgaaatagaacaagacacttagtgcatagatcaaggtcgtcgcttcgcctagtctcgctacaatggattccatcatcgcttaatcactcactggcaactgtagcaaagccttgtgccatatttggtttgaacagctgaaatgacccttgctccacctgtacaggctccaccttttgctcttcatcttcaacctgtaaatcaaagatttctttgaagagtaaaagtttttcctctgcattcggctccgcggcaatttcttttgcctttaagataggatctttcagcatttgattaataatgcttttcgtatgtttatttaatagcttcatttcacggtgtgtgaggttcggaagctttcgttcaatactctgcatcgtatccgcttgaatcgtcagcgccttttctctaagtgcagaaatgacaggaaccacaccaagcgtattcagccattgcttaaattccacaatttctgcttcaatgaggagctcaacctgctcagccaccgcacgacgctcttttaagttggctgccacgatgccctcaaggtcatcaatgtcatacaaaaaagcaccttctacttcagaaatggctggatctaaatcacggggcacagcaatatccaccataaatagaggtctgcccttccgctttttattcgcactttcgaccatttcctttgtaatgacaaattgtttcgcaccagtggagctaattaaaatgtccgcttcggataatgttttttccaattggtttaagcttttaggctctcctgaaaaacgacccgccaattcttttgctttctcatacgttcgattgatgaccgttacttgaccaatcccttgaccttgaaggttttgagccgctagttcgcccattttacccgcaccaagaatcaggacatgtttatcagaaagacgtccaaagatttttttcgcaagctcgacagctgcatagctgacagacacggcattagacgcaatgtctgtttccgcatgagagcgttttgcaacggtgaccgcctgtttaaataaataattgaaaacggtaccaatggtcttctcctcttgagctactttaaagctagagcgcacttgaccaagtatttgtgtttcgccaatcaccatggaatcaagtccacaggccacacggaataaatgctcaaccgctccatcattttcatagaacttcaaataaggagagacatcttctttttctaaaccgaaccaatcggctaaaaatctttttatataaaaccgtccagtatgaagctgatctaccactgcgtagatctctgttcgattacatgttgagatgacgatattctctagaatgcttttttcttctttaagcttggacatcgctgttccgagctcgctcggttcaaagctcagctgttcccgtatctcaacaggggctgttttataatctaaacccacaacaagaatatgcataacttcagcttgcacccccaacgccctgtctaatttataataattacaatatagaatttattatttataatgattataacatatattcatttttaactggatgaaaattgtgaacagatttcaaaaatgttgtgatatagtagaaaaatgttcgacactaattatgccatatcatcacttcaagcaatttaccagatttggcgcgtgcggacaaatgatctgcttaaaagaaggtgacatctttgaagaaaaaatccattttgctgccgctcactttgctggctgtagcgctatatgccattctctcaggaggtcaatttgacatttggaaggatcaagagaaatggtatacactcatactgctttttggcctcgctttcttatatcaaggaaagaaggagcaagaaagcgctcatgtgtttatcggtatgcttatgacgggcctttcgctacactttattcttcaaccaaaattagaccactggccagacacatttacaatgatcgtattcatcgttggacttgcactctttatgaaatcatctcagaaaaaagaatatcgtattgaaagtgttgttctcattgcactcggtctgttcctttatttctttcagcaaattacaaaacagctaagttccctttcgatccctacttccggttttgaattgtactggccttatgtactgattgctgtcagtctcctcttattatttttaaaaaggaaataacttatacaataaaaaggcatctgtccatgacagatgccttttcttttagctgttaatcttcgcaaggatggcgttccaggcttcgtcttttccctttttcgtttcagaagagaacaggactagttcatctgatgggtcaatgtcgagtgtctgtttgacgactttcgcatgtttttcccatttgccttttggaattttgtccgcctttgttgcgatgacgattacgggaactccgtaatatttcagaaattcatacatgttcacatcatctactgatggcttatgacgcaggtccacaatttggacgactgcttttaattcttcacgcattgtaatatacgtttcgatcattctaccccaggcttcgcgctctgtctttgatactttagcaaagccgtagcctggaacgtccacaaaatggagcatatcattgatgatgtagaaattaagcgtttgagtcttacctggtttagaagacgtacgcgctaaatttttacgattaatcaatgagttgatgaacgaggacttcccaacatttgatcgtccagcaagagcgatttcaggcagtcccccgctcgggtactgctctggttttaccgcactaatgacgatatctgattttgttactttcatcttccctctcctaccaacgctttctcaagcacctcatctaaatgtgagaccggaataaaggttagtccttctctcacactttcaggaatatcatcaatatccttctcattgtcctttggaagaataatggttttcagtcctgcgcgatgtgcgcctaatgctttttcttttagtccgccaattggaagcactcttcctcttaacgtaatctctcctgtcataccaacctcttttgacacaggtcgtcctgtgagtgctgatacaagagccgtcgcaatggtgataccagctgatggcccgtcctttggaaccgcaccctctggaacatggatatgaatatcatgcttttcattaaaattaggatcaatgttcagttcatctgctttcgaacgaatataactgaatgccgcctgtgcagattctctcatgacatcaccaagcttccctgttaacaagagcttgcctttaccgggagaaagtgatacctcaatcgacaaggtgtctccgccaacagtggtatacgcaagtcctgtgacaacccccacttggtctgtcgtttcagcctggccataacggtaaagtctttttccgagaaattcagataaattcttttccgtcaccgtgatgcgtttgcggtcttcagccacaatcgctcttgccgctttacggcatattgccgcaagctgacgctctaatccacgaacacccgcttctcttgtgtaatagcgaatcgtatcataaatcgctgcttcacgaagctgcaagttccctttctttaatccgtgctcctttagctgcttcggcagaaggtgatctttcacaatttctgctttttcaacctctgtataccctgcaatcgtgataatctccattctatcacgaagtggacctggaatggttgctaaattgttggcagtggcaataaatagcacctgagacaaatcaaatgtttcttcaatatagtgatcgctaaagttatgattttgctctgggtctaagacttcgagcatcgctgaagatggatcacctctaaaatcagaggacatcttatcgatttcatctaaaaggaacaccggattcatcgttcctgccttgctcattccgcgaatgatacggcctggcatcgcacctacatacgttcttctatgtccacgaatctcagactcatcgcgcacaccgccaagggagatccggataaactttcggtcaagtgatttggcaatggatttggcaagtgacgttttccctaccccaggaggtcctgctaagcaaagaatcggtccttttaatgaattggtcagcttctgtacagcaagatattcaagcactcgttctttgaccttttccagcccgtgatgctcatcatctaaaatttcacttgcaagctttaaatctagacgatcttctgtatagatgccccatggaaggctgatcagccaatcaatataatttcgaatcacagagctctcagcagagcttgaaggaattttttcataacgattcaattctttgagcgccgtttcacgaacagaatccggcatgctcgactcttcgattttagacattaaagaactgacttcgccagtttttccttctttgtctccaagctccttttgaatggctttcatttgttcacgcaaataatattctttttgcgttcgttccattgaacgtttcacgcgctgcccgattttcttttcaatctcgagtacttctttttcattgtgaattaagctgatgacccggttcagccgttttttgacatccactgtttccagtacttcttgtttgtcctttaatttgagcggcaggtgagaagcaacgatatctgccattctccctggttcctcaatatccgtcactgttgcatatgtttcagctgagattttttttgaaatttttatgtattgatcaaagtgatctaacaatgtacgcatgagtgcttctgcttctgcgtcctttaaatcttcttctgccaattcttttatgtcgacggacgtatagtcctccagctctacgtatgattcgatctgcgctcgattcaagccttcaacgagtacacgaatcgttccatttggcagcttcagcatttgtttaatttttgtgtaggtgccgactttgaaaatttcctcttcacctggttcatctattgaaatttcccgctgtgttgctagaaaaatcatatgatcgttcatcatcgcctgttctaatgcttgaacagacttctcgcgtccaacgtccaaatgcaagaccattgttggataaacaagtaaacctcgcaatggaaggagcggaacattctttttgatttcatctgccatgttgattgacacctccgtcactagtatgaatcattataatatacctgtttcagtcttgtacaatgtaaaagacttgagaaatgttgatcttaccgtagtataccctttctttttatcatgaaaaagaaaaaaagatctatttcactaaaaaatccccatatgtgatggggattaaacagattttcttttcatttcgtcttctagtccatctttcttctcgtctggcgggttgaccaaacactgatccagcacttcttggaagtgcttcacaggcacaatggtgaccccttcaatctcttttaagatcgactgctggttgtcataaggaataatgacggttgtggcaccagcttgtttcgctgccttaatcttcggtatcacaccgccgatcggcttcacctgaccctgcaatccgatttcacccgtcatggctgtcagatgatcgatcgggatttgatgtatggctgagaagatcgcggtcgccatggcaatcccagcagacggtccatcaataggggcaccgcctggaaaattaatatggatgtcatattcatttgtccgaatgcctaaatttcgaagcaccgttaatacattttcaactgaccctttggccatactttttcgtctaatggatttcgactgattgccaatgctttcttcttctgcaatgcctgtaatgttgatactgcctttttcaagcgccttacagatgttcacttcaatctcaagcagggcgccgctgtttggtccataaacggccagtccattgactacccccacttttggcttttctggtactttttgttcatatcttggtgtcagctggcttgaatgaatgacccattctacatcttcgatcgtgatgtcttttcggttttccgtgacagccataccagcggcaatctgcaccatgttgaccgcttcacgtccatttttcacataggatgttaaaaggttcagcccttcatcacttaattccttttgaattttttggacagccttggcagcgacgattttcagttcatgctggtcaaggtccttaaagaaaatttccagacaccttgaccggatcgctggtggaatttcgtcaggcgttcttgtcgtggcaccaatcaatcgaaaatcggccggaagcccattttggaaaatatcatgaatgtgatttgggatttgggtattttcttcactgtagtaggcactgtctaaaaagactttccgatcttcaagcactttgagcattttgttcatttggatcggatgcagctcgccaatttcatcgataaacagaaccccgccatgagcatgtgtgacggctccttgttttggctgcggaatgcctgcctgtcccattgctccagccccttggtaaatcgggtcatgcacggaaccaatgagcgggtctgcgatgcctcgttcatcgaatctcgcggttgtggcatcgagctctacaaagaccgcatctttcttaaacggtgaatcagcgtgacgcttcgcttcttccatcacaagacgggcagcggctgttttaccgactcccggtggtccgtagacgatgacatgctgaggattcggcccgcatagtgccgcttttagtgcacgaatgccgtcttcctgccctacaatatcttgaaacccctttggccggactctctctgataaaggttcactcagcttgattgaccgcatctttctgagtgcttccatttctttctttgactctttgtctatcgtcaccttttgtgtgcgctgatttcgcagtaagttccaaaagtacagcccgatgacgataccaaagaacagctgtatgaataatacgattcctgtccagctcaatcggtgctccctccttcatctatcgtatgtattggtttctgtctgctagtatttcctagagctggacggaataaacacaacttccacgataaataaaaaactcctgaatcaaaaagattcaggagtgagactacccttatgcagatgttttcgtatctttattgacgactgtgccgtcctttaacacaagacgcggcgactcgccatcggcaaccgttgcaccagtgatcacacatttttcaatatcatcacgtgatggaaggtcaaacatcacatcaagcatgatgccttcaatgattgaacgtagaccacgagctcctgttttacgctcaattgcttttttcgcaatttcgctaagagcatcttcttcaaactcaagctctacatcatcaagctcaagcatttttgtatactgcttaacgagcgcatttttaggcttcgtcaagatctctacaagtgctttttcatctaacggctctaggcttgcaataaccggtagacgaccgatgaattccgggattaaaccgaagcgaagcaagtcttctgggagtacttttgatagaaggacttctttttcaagatcttcgattttattttccgcaccgaatccaatgactttttgacctaggcggcgtttgatgatttgctcaatgccgtcaaaggctccaccacaaataaagaggatatttgttgtatcgatttgaatgaattcttgatgaggatgcttacgtccaccttgaggcggtacactagcgacagttccttcaagaattttcaatagtgcttgctgaacaccttccccagatacatcacgagtgatagaagggttttctgattttcttgctactttatcgatttcatcgatgtagataatgcctttttccgctttttctacatcataatcggctgcttggatcagctttagtaaaatattctctacgtcttcaccaacataacctgcttcagttaatgatgttgcatctgcaatcgcaaatggcacatttaaaatacgagcaagcgtttgagcaagtaaagttttaccgcttcctgttggcccaatcatagagatattactttttgaaagctcaacatcatcaatcttgctgttggaattgatccgtttgtagtggttatacaccgctacagctaaggatttcttcgcattttcttgtccgatgacatattcatcaagaatctcccgaatttcatgaggcttcggaacatccttgaattcaacttcttcctcagtgccgagctcttcttcaactatttccgtgcaaagctcgatacattcatcacatatatatacgccaggtcctgcgaccagtttacgcacttgatcttgcgtttttccgcaaaacgagcattttaattgacctttttcctcgttgaatttaaacattctttcaccccttattcttcttcacttgcctgtagctaacagtcagctacctttctgggtccagtatgtatgcattttaccatactttcctaaaagacggtaatgatgtgtttctaacactgcacattgagatatgtataacagaaagatgcgacttacactatcgtttccaaaagaagcgatgataagtcaaaaattgtacaaaacaaggcacgagtcactcgcgccctgttttattattatgcaccatattaacggttttctacaagaaaatcaattgctttgcgaacttttagatcttctttcattgcgtcagtagatccgatcgcttgtttgatattttcaattggcatgttgtatgcttcagccatttttgaaagttcttcttctacttcttcatcagacacttgtaagttttctgcagcagcaattgcttcaagtgttaggttagatttcacgcgtttagcagcatcttctttcatttgctctttcagcgcattttcatcttgtcctgagaattggaagtaaagctcaaggttcattccttgcatttgaaggcgttgttcgaattctttcatcatacggtctagctctgtgtcaaccatcgcttgagggatgtcaacttccgcattttctgaagctttctccactagctcttcacgaagtttaccttctgcttcgttttctttcgcttcttcaagacgtttcttcgttttttcagttagttcagcaagagtttctacttcttcatcagcatctttcgcgaactcatcgtcaagtgctggaagttcttttgctttgatttcgtgaattttcactttgaatacagctggtttacctgcaaggtcttcagcatgatattcttctgggaaagtgacttctacgtctttttcagcgcctgcttcaagaccaactaactgctcttcgaaaccagggatgaatgaaccagaacctacttcaagagagtagttttcagcttttccgccttcgaatgcttctccatcaacgaatccttcgaaatcaagcacaactgtatcgccgttttcgattgcgccttcttctttgacaacaagctcagcttgacggttttgcatgccttttaactcttcttgtacatcttcatcagtgacagtagcgtcgtctttttctacgttaagacctttgtagtcaccaagtttcacttcaggcttcactgttacttttgcagtgaagattaagctttcgcctttttcgattttctcaacatcgatttcagggcggtcaactggctcgataccagcttcgtcgattgcttttggatattcaactggaagaagaatatctaatgcatcttgataaagagattctacaccaaaacgctgttcgaaaagaccacgtggtactttccctttacggaatccagggatcgatacttgcttgacaaccttcttaaacgcatcatcaagtgctttgttaaatgtttcagcatcaacttctacagttaggacgccttcgttaccttcttgtttttcccattttactgacatgtgtgtttccctccaaaaatctattcagattgtgcgttgttacattctaaagcatcataaagacttcgtccaatcaaaaaccacgcacgccgctcaagaagcggtattatgtatacaacatttgacttgattatacatatcgtctttcaaccgttggaatctacaactgcacgatatatgcacaaatacaaccattatattataacataacaagtccgtctttcaactaaatcgacaaattacaaataagaaatttcttcaatatctttcagcattgtgcaagcttctctcagctctcgttcattaaattcatacaatagatgcaattcttcgaggtcaatctcaatcccgtgcatttcatagccgactttatgaagtgctgctgcccaaagattcggatctgtgtatttaggaagaaatggataaagcacaaataagtgccggcgccataactcttccacgccttggtaaagggttgggttctcattgccgagtgtgtcatcgagcttacgaaggacttgctgaagtagcggcatctgctctggcttaacagcctcagaaggaacaagcgttaaagaatcaccgaatttcgtcacatgaaccggctttgccacatcatgatctgacagaagctgcaggattaatgatttgaccaaagggtttccatcaggcttttgtaagatcgtatttaatagacccatgtgtggtgtgatgttccggtctttcaacgaatggatgaactgcacctgctcttctggccgctcaagcatatcatctatattgatttcgccggcgtcctcctcatcttcatctaaaatctgttcaggcgattcaatcatttttctactaaattcgagcagcttgtaaaaatgctccgcgctttctgctggaaggtggttttcctcaagtactgcctcaattgtctgcttcacttcttcatattctttcagctgaattaaaatcgtcatatacacttgaagcacggtgaagtaatgaccatatccctcatgcagcatcttttcacaaacacgctttgcatcctgcagctcgcccagctccagaaaacaaatcgccatgccgaggtgaatatcggattcttcatcgtcatcataagatttcgcttctgaaaacaagtgaagcgcctcttgatactgtttatcttttaatgctgccattcctttttcaatcagtctttctttcagaccaggaaacaaaatgacattatctttcttcttgtcatgtttcatgcttacgttcctttcgggcgcatattttttatcagtttaccaacgaaggttagtaaacacaagtaacgagaggttttcatgcaaaaaagaagccgtcacacctcgggcggacggcttcttgttgtttacgcacgcagccagctgctgcgcttatcttcaaatgcttgaatgtcatcttctagtagtaaagttaatgagatctcatcatagccattcaggagcatttctctccagtgaggatccacatcaaaaggagtgatattcccttcatgatcttctatttgctgtttttccagatcaaccgtcatctcataccctttgttctcatatgacgcagcgaatgttttccacacatcataatcaagacgaatcggaagcatcccatttttaaagcagttttggtgaaaaatatctgcgaatgatggtgcgatgacaattttgaaaccataatcatcaagtgcccaaggggcatgttcccttgatgatccgcagccaaagttttctcctgcgatcaaaatggatgctccttcataaatcggctgattcagctcgaaatcaggatttgggctgccatcggctaaataccgccagtcgaaaaaggcaaaccggccatatcctgttcgttcaattcttttcaaaaattgcttcggaataatttgatctgtatctacgttgatacggttaagcacagcggctttccctttgtgtgtgactaaaggctccatctatgacaactccttacacgactgttttctcttgattaaacttcctgacatcgacaaatcggccatgtattgcagccattgcagccattgccgggctgacaagatgcgttctcgcaccttttccttgacgtccctcaaagttacggtttgatgtggatgcgcagcgttcgccttctggtaccacatcgttattcatgctaagacacatactgcagccagattctctccattcaaatcctgcttcaaggaagatttcatgaagaccttcttcttctgcttgcaatttgacgctttgagagccaggcacgacaatcgctctgacatgatcagctaccttttgtccttctatcatagaagctgcttggcgtaaatcagtcattcttgagtttgtacatgagccgataaacacatgctcaatcgtaatatcttcaatacgctgatgcggatgaacacccatgtattcgtacgcacgaatcgcttctttttgatcatcctcttgtgcaaaatcctcaggtcctgggatcgacgcatctacaggcagcaccattcctgggttaattccccatgtgaccattggtgaaatctcattcccatctaaaacaatcgttttatcataggttgcacctggatctgttttaagttcttcccattctttaatcgctgcttcgaagtcttctccctgcggtgcatatttgcggccgcggcaatattcaaaggtgacttcatcaggtgcaatcaatcctgctcttgcgcctgcttcaatcgacatattacaaaccgtcatgcgttcatccatcgtcatgtttctgaatacttccccagtgtattcaatcacataacctgatccgaacttcacgccatgcgcaccaatgactgctaaaatgacatctttggccgttacccctttttgcagctttccgtctactctaatttctaatgttttcggacgctgctgccaaagcgtttgtgtggaaagtacatgttcaacctcacttgtaccgattccaaaagcaagtgcgccaaacgcgccatgagttgatgtatgactatctccgcaaacgattgttttccctggcagtgtcaacccaagctccggtccaacaacatggacgatcccttgatctacactgtgaaggtcagctagacggacaccaaattcagcacagttgcgctctagagcactcacttgttttttagcaatctcatctttgatcacaaatcgattcacagtcgggatattgtgatccatggtcgcaaacgtgttttgaggtcttctcacctttcgtcctttttgtcttaatccttcaaatgcttgaggtgatgtcacttcatgcactaagtgcagatcaatatataaaaggtctggtttcccctcgccgcttttgacaacgtgctgatcccatattttttcgatgattgttcgaggcataacccttttcctccctctacctaattccacaagattctatttatacaattgttttcacgcgctgcttgagtgcgtctacaactgcatgagtgatgtcttcagttgtttgatacgttccctcttttgccgataagtcctttgttcgtttgccagaggcaagaacagcttccacagcttcttctattgcagccgcttcttcttctaacgcaaaagatgttctaagcaagctagctgccgacaaaatggttgctagagggtttgcgacgttttgccccgcaatatcgggtgctgaaccatgaatcggctcatataaatggaggccggtgcttgatagactggcagatggcagcataccgagtgacccagtaatcattgaagcctcgtcacttaaaatgtcaccaaacatattctctgtcacaatgacatcaaattgagcaggcttataaatcagctgcatggcggcattatcaacgagcatgtgctcatattcgacgtctggatattgagaagccacttcttctaccgcatcccgccatagtttactagaagcaagaacattcgctttatccacagacgttacttttttccgtctcgttaaggccatgtcgaatgcttcttttaatacacggacaatctcttcctttgtataaagaagcgtatcaaccgcagcttcttttccttcttcatccgtgtaacgctcgcttggttcaccaaaatagagaccgcctgttaattcacgaacgatgacaaaatcgactccgctaatgtgatcctgttttaacggtgacgcctcgcttaagctatcgaacactttgacaggacggatgtttgcaaataagtccagttgtttacgaatagcgagcaagcctttttccggacgaagctctggcgggttttgatcccattttggtccgccgactgctcctaataaaatcgcatcagcgctcttgcatacatcaaccgtttcttttgggagcggattgtttttttcatctattgcgataccgccaatgagcgccttttcgaattcgaattcgtgttgaaattgagccgctgtctctttgaggacagcgaccgctgatgtcacaacttccggtccgattccatcgccgggcaaaagtgcaattttctttttcatgagaacctacctcctttcctatgaaatcgcgtgatgtttctcaatttcaatgagatttgatttaaagattaaatgcctgtttactgcattgacgtaggctttcgccgatgcttccagcacatcttgcgccacaccgcgtccagctgtttcttttccttctattgaaacagtgacatatacttccgctagtgcatctctgccttttccattcgattgaatacggtagtctagcaaatgaattctttcctccatacagcgctccagcgtgttgtacacagcttctacactgcctgcgcctgtagctgcttcttgaatgacttcctgcgtttcttgatttttcagagagaccgttgctgttggcatttgttctgttccatagtgcacttgaagactttcaaattcgtagccaatttttcggtctgctactttttcttctaatataatagagatcaaatcatcatcagtgatttcttttttcttctccgtcaagttcttgaaggtttcgaagaacttattgatttcttcttctgttagtttaaagcctagcgttttcatacggtctttaaacgcatgtcttccggagtgtttcccaaggacaagtacatctgttgtcacaccgacaagctctggagatatgatttcataggttgttttttctttgaggaaaccatcttggtgaatacctgattcatgtgcaaaagcgttgttgccaacgactgctttattgcgcggtacaatcattcctgagtatttgctcactacatcacttgtacgcttaatttcattcaattgaatcgttgattcgacctggtagaagtcttttcgaatatgaagagcgactgcaatttcttctaaagcggcattccctgcacgttctccaattccgttaacagctgtttcaatttgatttgctccattttcaatggctgcaagtgagtttgctacagccattcctagatcatcatgacagtgagcagacaaattgacgcggtcgatatttggaacgtgttccttcatatatttaaagatattgccgtactcttttggcgctaagtatccaactgtatctggcaagttaatgacacttgccccagcgtcaatgaccttctctacaatttctgctaagaaagctagatctgtacgacacgcatcttctgcggaccactggacaaccggaaaacgttctttcgcgtatttcaccattgagacagcctgttctacgacttcttcacgtgttttctttagtttatgcttcagatgaatatcagaagtagcgataaagatatgaattcttggttccactccatcttttaacgcttcccatgcagcatcgatgtcacctttcacacatcgtgcaagaccagcaactgaacagtttttgatcgttctagcaatttcttgtacgcctaagaaatcccctcgggatgaagcgggaaaacccgcttcaatgatattaaccccaaggcgctcaagctgctttgcaatgattagcttttcttgtgcatttaagttcactcctggtgattgctctccatctcgaagtgttgtgtcaaaaaaattaattttccgcaccgacgctcaccgcttcctttttctttccttgtttgacgaaaggcatcatttcacgaagctttcttccgacgatttcaatttggtgctcattttcatttgcattgatcgcattgaaacgtggacgattcacttggttttcaacaatccattcttttgcaaatgttccgttttggatatcagtcaagacggctttcatagattcttttacgtttgcatccacaacgcgtggtcctgatacgaagtcaccccattgtgctgtatcagagattgaatatctcatgccttctaatccttcttcatacattaggtcaacaattaatttcagttcatgcagacactcgaagtatgcaagctctggctgataaccagcttctgttaacgtttcgaaacctgctttcactagtgaagtaagacctccacaaaggaccgcttgctcaccgaatagatccgtttccgtttcttctttaaatgttgtttcaaggacgcctgctcttgctccgccgattgcttttgcataagcaagtgctttgtctttcgcttggccagatacatcttgatagatagcaaatagggcaggtacaccagcgccttgttcatatgttcttctcacaagatgtcctggaccttttggagccacaagatacacatctacgtcacttggaggaacaatttgatggaagtgaacgttgaatccgtgtgcgaaaacaagtgagttgcctgcttctaattgatctttgatttcttcgtcatatactttcttttgctgctcatctggcagtagtaccatgacgacatctgcttgtgctgccgcttcttttactgtgaatacttgatggccgtcttcttgtgcttttgtataagatccgccttttctcacgccgacgatcacatctacgccgctttcttttaagttcaatgcatgtgcatgaccttgtgatccatacccaatgatagcaaccttttgaccatttaatacgttttcttgaatatcaccgttataatatacttttaccatttgactctctccttttgtttagacaattgaaattgttttatttgattgcggcttttgctgattatctctcgcaaaggccgtggtgccagttctggcgacttctttaatgccgtatggcttaagtaattcaatgagtgcttcaatttttgaagactcacctgtcacctgaatgacgacactctctctgcttacatctacaatagaagctctaaacggttcaatgacccctgtgatctccattctagatgccggtgcagaaacgacttttatcaaagccagctctcgctgaacgattgattggtttgtaatgtctgttactttgagaacatcaatttgcttgttcagctgttttgtcagctgttcgatgtctttctcttggtctacatggacgacgaacgtgatgcgtgatacatcttgaatctcagaatggccgaccgtaatgctttcaatgttgtagtgtcttttggtaaaaaggccagtgattcggttcagtacgcctgatcgatttaatacagtcaacacaataattcttttcaaggtttcacccccaccatctcatgaagtcctttccccggtgcgaccatcgggaatactttttcatctctcgctacattgacatcgatgaaaacaggctctctagaggttaacgcttcttcaagcttttctttcgcctcttcgtctgatgagattctgattcctttaatgccataagcttcagataatttaacgaagtctggctgctctgaaaatttagaatatgagtagcgttcttcgtagaaaatttcttgccattgtcttaccattccaaggctgtgattattcagaacaatcactttcactggaaggttcagctcacggataacggcaagttcttgcaaggtcatttggaaacctccgtctcctaaaatcgccacaaccgttgcctcttgatcagccagctgagcgccgatggctgccggtaaaccgaagcccatcgtaccaaggccgccagatgtgacccacttatctgcattttcaaatggatagaactgagctgcccacatttgatgctgtccgacatcagttgccacaatggcttcaccttttgtgaattgatgaatgtattcaatcagcttttgaggcttaaagccctctgcttcgttttcaacgtaccagagcggatattctgccttccactgatctaattggtttttccatttgtctgattccccttgcttcccgtcttgcttgatcagctcttcaaggactagcttactgtctccaacaaccgggatatgggtatgaatgttcttaccaatttccgccgggtcgatatcaatgtgtgctaccttcgcatgtttcgcaaagtgattgaggttgccagttaccctgtcatcaaatcttgcaccgattgaaatgagcagatcacattggtgaagggccatattcgccgcatatgtgccatgcataccagccatccctagaaatagaggatgctttgctgggaatccgccaagtccaagcagtgtatgagcgactgggatttgctgctgctctacatactgccttaattcttcagatgctttgccatgaagaacgccagctcctgctagaatgactggtttcttcgctctgcttacagcttctactaatttgcgaatttgcaaatagttcggctcgacttttggctgataaccaggtaaatcaattggctgatcatattcaaacgttccttcaatgcctgccacatcttttggaatatcaatcaagactggaccaggtctgcctgttgttgcgatgtggaacgcctctttaatgacacccggtaattcctctggatttcttacttggtagctgtgctttgtgattggcattgtgatgccgagcacatctgcttcctggaaagcatccgatccaataactgaggttgccacctgtcctgtgaagacaacaagaggaagtgaatcaatcattgcatctgcaattcctgtgacaaggtttgtcgctccaggtcctgatgtcgcaatgacaacacccggtttgccagatactcttgcgtatccttctgctgcgtgaatcgctccctgctcatgccttggcaggacatgaaataaaccagaatcataaattttatcgtagatcggtaaaaccgctccgcctggatatccgaaaatgacttctactttttctcttttgagtgcttcaattaacatgagtgcaccgttcatcgtttgtggtgctttagatgtttccgtctccacttgtacatttgtccccatttgatttcctcctctttgtcttgcttcagtcaagtcttttcacccttttctattcaagatcgagattttagaccatataaaaaagccttctcaccccacaatgacactacttttcactaggtcaaaggggcgaaaaagctttgtttttcgcggtaccacccttgttcacggcaaaatctgctgccgtctcatggacatctttcatccattttggtaacgagtgagcaatgtcactcggtctgccctactatcatttcaagcagacactcagaggtgagttcactttagaaagtaacaccggtttccagctaccaccggctctctgtagatactgactctaaagctactagtcctcttcaacgtttatcgatatctatttagcttgcgtgaatgttttcatctgtaaatacgactttttctccttcttcaaccactcgcttgcggaattgttcaagaagtttgtttgtgtggaccccaggtttcccttcaccgattgtacggccgtcaacctttacaacagcgatcacttcggctgcggttcctgtcagaaaaacttcttctgctgtatacacatcgtgccttgtgaatggttcttctttcacttcgtagcctaagtcttctgcaatctccatgatggcatttcttgtgatgccttcaagagcgccgatataacctggcggtgtataaagcttaccttttttataaataaacacattgtctgcagaaccttctgccacgtacccttgatcgttcagcatcagcgcttcactcacaccggccatatgggcttcgattcggacaaggatgttattcaaataatttaatgatttcacttttgggctcagtacatcgggacgatttcgtctcgtcggtaccgttacaatatcaatacccgtttcatataggtgctttggaaagatggccagcggctctacaatgatcactgtgttggctctcccgcagttgtttggatctaaaccaagatcaccagctcctcttgagacaacaagacgaatataggcatcctttaggccgttcctttcaactgtatgaatcattttttccgtgagttcctcaagtgaatatggaatgttcagcataatggatctggcggaatcatacaggcggtctaaatgttctttcattcgaaagatatttccgttatacacgcgtatcccttcgaacacaccgtcaccatataagaagccatgatcataaactgaaatttttgcatcctcttttttcacgagttcatcgtttaaaaagatccactgttccttttggtcttccattttcagtgagcaccctctctttcaagcaaaaagtagttgaattttcagacactttttattgaagcctctcacgcttgctctgcgtgtttgtttagcttttgttgaacccatcttacgccgctttccatacagtgtcaacagcatttttaaaattattagacaatttagactaatcaaaattaaatgtatacgcttacacctttgctagacaaggaatgaaaaaacttaaaattttttgtattttttcttcaatttatttactttacctgaacgcttttcttttgagaaaacgtttgtcatattttttcacatcgtttttaatgaatactggtagatttcaacgcttttgattttctatcggcatgcctttctaaagcgttttcctatgaatttatgatagaatgagagcatcttatagaaggagggcaatacatggctaacatcagaggttatatcggaacatatacaaagggagacagtaaaggcatttatacttttacattaaatacggacaagcagcagatcgaacaagtaaaagtagctgctgaacttgaaaatcctacatatttaaccgtctcagattctcaaaaatttgtgtattctgttgtgaaagaaggatcacagggcggcgtggctgcgtatcaaattgatgcagaaaccggcacacttcgtttcatcaaccaagagcttgccgatggcgcttctccttgccacgtcagcgtggacaatcaaacaaaaacagcttttacagcaaactatcataaaggaacagcagagatgtatgaaatcgatgctgaaaatggctcagtcatccgcacgctgtcacaggcgcagcatgaaggaactgggccaaacgaagaccgtcaggaaaaaccgcacactcactttatgggtctgacaccagatgaacaatttgcagtggctgttgaccttgggacagatggcatttatacgtataagaaagagggcgacaaactcgagcttgctcatacatttgaaacaaaaccaggcaccggtcctcgccatatcacattccatccaacgaaacctgtggcatatgtgatgacagagctaagctcagaggtgattgtgcttcgttactttgaagatggtcatttcgaagagatccaaacgatcgcaaccattccaagcgactttacagagaacaatcaaggcagtgccattcacgtctcttcagacgggcaatttgtttatgcaggaaatcgcggtcatgacagcattgcgatttttaaagcagacgccgacggccaattaagtcttgtcgagattgcttcatctgaaggaaactggcctagagactttgtgcttgatccaactgaagaattcctcgtcggttcaaaccaagaatctagcaacctagtgttatacaaacgcgacaaagaaacaggacgactcactgtcttacaatcagacatcactgttcctcatccagtttgcgtgaaatttttaggataatgaaaaaagcctccgttttgggggcttcagcttgttgacaaagggctaaaatgatttttattttagccctttgtcttcttttcagcgtgcagacggcatcccgccatcttcaagcttttgatcaataagagacgtatcggttttttcaccgaaccattttgacagcctgtccttcgcttttcctttcacatcatcatcaatgtacatcgctacttggagcagagcaaatgtgatcgctcctaaatcatctgtgtagccgacaccaatcaatgtatcagggatgaggtcaataggaaggataaagtatccgagtgccccaataataagggtttttgctttgacaggcacttcgggtttttgcaatgtatagtaaagtaatagcacagcatagacaagagagacaccagccttttgtgccgtcttttttaacttttcccaaaaggcatgatcattaaaatgcttcttcgaacgctttaatagttcttttttctcagaacggttcatcatatcgcctccatctacagcatagcccttttcccttcgttatacaagatatccgccgattcgacaaacaaaaagcagcagaaagctgctgcattctactgctctttgtaaaacttttcgatcgccttatcgatgtagacccatcctttataagacacatgaattgtatctttaaagaagtaaggatcgtattcatgtttagtcaaatctgcgacttcatacccattatctcgaatttgacgattgattttctcataatactctgtacgcccctctttcgggaaaccggtataatcataccattttccattgacaggaatcgtcacaaacaaaggcttcgcccctgcctgttttaaaatatccagcatgatttgaaaatctttgtattctggtgattccgcataagagtggtcttcacgagaatctttcatctttttcatgatcggtttcagcttgcggtcaaatagtttttgattaatataaaacgggttgttccctgctttttccgcacctaagacacttgcttctttttcaagctcagtccatgtttttcctttgacagaaggagacggatgaagcttacgctctttccccgatccaattgtatagtacatgtctttcttttgaagcatgccataatacatttttgcaataggagaaatcgcgccataagcgaatttgttcccagaaagctctgctttaaaaagttctgtgatgaccatgtcgttctttacagctttaaacgtcatgattctcttgatcagctcttttttcacagctggatcaatttctttattataagcgagattaagcgcttgaagcgctgaatagttcggtgcaaagtgattctcgtctgatccccatttcacaaaccactgcggggacacgataaacacaagcttcttcccttttaattcatccatatgcgatgcgaagttcatcgcatgaattaatgattgtgacccacctttcccaataagataaggtgtaaacccttgaggattctcatgaaagaaattcgaagggtgatatggatcaaaacgtgatagttcagaagatccatagatcggcaaataagttggatcttttagcatttcatcttgtaaataaagcccctgaaacatccctggatctaattctgtggctgacttttgtaatttgtcttttgggatcagatgtgagagccatgcatttggtacaagaagaacaccaatgaatagaacagccgctaaaataagcggcccaaaaaaacgctttttcattacttcatctctgccagctgctcagcaatgtgattcggtgtatcccacacatcacgatcgaactctgtaatcggaacagtgattccgagctgactttcaattgccataagcagttctactgtaccaaatgaatctagaagaccttcttcaaaaattgcaatctctggattttctttcacaacgtcgtcctgacaaacctctgcaataataccgtatacttgatttttaaattccataattttctactcccttaatgattaatgatgaaatggttttcctgaaaaaatataaaatccgaaacaaatcacatggaatgtaataatgatcgacacaatcattgtgaccttattatccggccaccacttgtgctttttattccatttctcaaataaattgtaaccggacatcacaactgcgtgatatagtccgtaaataatatattgaagtgctagaccatgccaagcacccatcaatagaaagaggacaaagtacccaatatttgatacagccatacggttcttgatccacttcttttttgtcataaagaacacaaatctcataaacacgtagtctctgaaccagaaggagagggacatgtgccagcgattccagaagtctttaatgttccggctgataaacggtttgttaaagttttctggtgatttaatgcccataatataactcacaccaacagcaaatgctgtatatccagcaaagtcaaagaacaaatacatactgtacgcatacatatacgttaactgttgaacaaagtgactgctgctaatgtgatgaatattcatgagaatatacgtgtgaatcagataaccaataatgaacttatataagaagccgataaaaattttatgaataccggcgtatagaagatcactgtacgcttccttttcaggcggcgtatccatatccttttcaaaccggcggtaacgatcaatcggacctgatgaaatcgtcgggaaaaagacaatgaaatagaccaaacgatgaatcggaattttcttcttaatcaagccgtctcttgtctcgataattaactggacacctttaaatgttaggtacgagattcctaaaaaactcagccagttcattggcggcggttgatgcggctgatgagttaaaaagaacggtaaaacctttgagagtacaagcggcaaaatagatgccaccactgccatatagaagacagacgcttgattcgccttcagccggtacgaaaggtacaagcggatgatcaagatttgccacactgtaaacaagaagagcagcaatgcgccatgtgcatcctttgagaaaataagcgcgagcgccacaaccgttgcaaacatgttgtagccctgcattcttttgccgcgaagaccaagaatgatcgtcggcaaaagaagaacaccaattagaatgaagaaaaagaatgaactaaacggaatcatagaagaacctctttcgcgattcttttacgatcaaccttcccgtttggcgtcatgtacagctgctcaagatagacaaactttcttggaatcatgtacgcaggcagtgaatccgccatttctttcttaattgcacttgtcagctgatattctttttcaaatgaatgcgctgctggaacaatggctgcaattaagtactccacatgaccgtttggctggaacggcacaatcacacaagcattgacatacgttgtctcgctcacatgatattcaatttcttcaagctccatccggtatccatgcagcttaatttgatagtccagacggccgtggcacgtaatcaaaccatcctgtgccacacccgcgtcacctgtacggtaagcagggcgtccttcgtatttaaagaacactttatctgttaaggcttgttcacctaagtagcctcttgtgatgcttggccccacgatgacaatttctcctttttcaccatcaggaagggtcttgccttcttcatctaaaatgacgatatctgtatctggcttcgcatagccgactggtaaagaatcgtgctgatcaagaatcgcctgcgtgacttcaatcgatgtgatcgcaacagttgcttcagtcggaccatacgtattaaagacctgcgcctttggaaaacgctcaaggagcgcacttgctacagatacaggaagtgcctctccgcagaacaagaagactttcagctctggtaaaagctcccctgtaaaggaaggatccattaagcacatttgcacaaaggaaggtgttgatgtccacacttcaacgtcagattgaccaagtgctgcaaacatatccttcggcttattcactagatctttcactaaacagtacagagtaccgcctgattgaagcgctggatacaaatccatcactgataagtcaaaagaaaatggtgcttgatttaagaaggtgcgccccccgccaattgggaagtctcggcacatccactctgtaaagctttctaaattattggctgttacctgaacgcctttcggttttccggtactgccagacgtataaatgatgtaaaaaacatcatcctgttgaacccactgcgaggatggcggtgcttctttttcaagagctaaaagagatgccgcacttttcacttcaatgtgttcttctacatctagtacattctgctcatttgcacaaatcaacagactggcttttgagctttcaataattgagacgatacgctcggcagggattgagatgtcgaccggaatataaggtctgcctgatttcacactacctaagaaagaaatcagcatctctggctccatatgaccgtatacaatgacaggtgcactgccagttgcgactgcatcaatcgcaccagccatttggtctgatagatgccaaagctcatcatatgtgatcgaagcatgttgagaaacaaatgctggctgtgttggtttcgtttgttggtattcatgaatcgtgtgtaatagtttcatagtttaatctccaattaaaaatcgttgtaaatgaatgatcccgtatttgctgtatggaatccgtaaataaagaacaataatagcaaaataagtaagtaaaaactcgtatatcctatccattttacagacttattttctgatagctttttgaatagcatattgataacctcttttcttttgacacttatagagacgcatgaatcattaaaagagtttcataccaaaacataaaaattttaagaaatgatgaaaaaagatgtcgaatcgataagcgtgtctttaggcaaagctgtcttattgtaacaaagatttaatgtatttgaaatgaaattcgagcttaaatttgccttaaaattgctgaaagctgtcgaataaacgcaaaagccacctagtttgcctagatggctttgatttcaattacttcttatatttattgacttcgaacatgagaatgtttttgaacaccacataatcctttttactttcaaagggacctttattgttgtcatgctcatcaatttcataaaaacctggcccttcacctgtatcacgttttttgtaccaggataggaaggagttgacttctttcattgaaaggtcatactctttctgtaagccattgaccattgtgatgatgagaagggcatcgccgtcttcatctgttaaaccgtcttttggtggtgtggttggttctgggtctttgtcgcctggactagttgaatcgtcttttggtggtgttgctggatccgggtctttgtctcctggaggaactgtagtgtcactgtttttaagactttttaatgaaatagataaattagatttgaaatcgttcctagcgtagttaggggcatcattactctgtggaatacctccaattacataaagtgtatcatcaataatggctgatacatgccccatacgataaggagctgaagaattagggacagttcttgatgtcttagtttgcttatcatagagtgtaactttagaaactccacctgttcttataatataatcttcaaaatttaatgcaccataataacgcccaattcccccaagtcctacacttgtccactgatctattgatggatcatattcaaacgttgcttgtccagataaaacatagagtttattttttataactacagcatttccagcaggagcgtctttttcaaattttttcttctttgtccattcttttgtttttatatcgtaactatacgtgttactgctgtaattctcgtgctttaacggtttattataacccaaaacatagattttattatctatagcacctgcgtataaatcgaaagcagatattttcaattcaaatgggaggtcttctgcctcttcccatttatccattttgatgttataaacttctacgctatttgaaaacccttgatctgttcttccacccattacatatatatgatcccctacaataacactagcagcacccatacggcctgttttcatactagctttttctgaccatttatctaacttcggatcatatacataagtagtattagaattggccttacctgaacctattccacctattacatagattttcccatcatatacttcgcttacagctcctactcttgcagctggcaattctgctcgtttttcccattcaagaatatctgccttttctgcttttattgattgtaatggataaattaatgaagaaatcaacataaataaaataaaaatacattttttcaagataaccacactccttcaatttgtttacataacaaatatcggatagttatttattttttccatgtttttgttacatatatatttttttattacttatttacttaccgtctccccaacgcgcctataaatttctaaaattagacttccgcattagaattattccatatttatattcattaattgcaggcattactcatatttttctatttctccatcataaaaacccatgattcataagtttcttctcagtccattattagaaaatccgtcacaaggcaagtgggttctccgttttcatctagccccaaaagcttggatacatcctgtcgccgaagcctgttgtaaacatggcaatatccaccttgtcatgaaaacttgtgacaagccagtcccatgtatgcttgtagttttgctcaaatgcttctgcaaattcttcataaagatagaaatcattgtcctctttatatcgtttatcctcataagcttgtaaatatattgctgcttccgcatccatgaaacaaccaattcccgtattcacaccgtagccgaagaactcatcttctttcagatgtttgagttcctgccctgctcgtgtggcaatctcccattctattgcttgctcgtttgtaaacttgaccattgcataggcgacgcgttcgtcaccgctttctaatcgcttaactacaagtagaataggatatttccctagagcaacctttctcgtaaaagattggtccccctctgaaacattaggatcacaggcaacgatatgaccgctcgtgatctcgatatttcctaactgtttagcaaataattgattaccttctgagctgcttttgttctcaccattttcaaaaagtaagtttgttggatcgatgttgtacaagggatcattcctttcattgtttttatggggcgtttgggattatgtaattttctctgttttgtcttttattcctgttttattttctccccactaatccctcaataaaaaatctgtaacaagacaagcttcatctctattctcatctcagcttcttgtatcctcaatcgtttctctaatacctcttcaagttcatcatatatgtcatcttcaacgttttgactttgtttggaaagtatatatatttcaaagcatgatcatccataaaacatccattttcagtatcaactccgtaaccagagaattgttccccctgtaaatcactttctatctgtccatttgataatgcaggctcccacttaacactacttttgctgctaaactttatgattgcatatgcaatacgttcatcttcattctaaaaacgaataatatttaaaagcactaaatactttcctggtttaacagttttatcaatagatcaatcaggaggtcattcagtgacacagcaaagcaagccatccaaaatgttattaattactttacccggcgctattattgcccttgtgatgatcttagggaaaattgatacacctgtaacaaatgttttattttatattgtggctttcggtgtaatgggtttagctgtttcaagcttagtaaaagactacagaaaaaagaaaagttaaactcttcatttaggaagctgtggttttatacagctccctttctttttgtgtacacttttaaaattctaatttaaagctaaacttaaattttagaacaaaaaagcctgaaatccttgataataaagggtttcaggcttttaatttagtacgtcccaggagagattcgaactcccgaccgacgccttagaagggcgttgctctatccagctgagctactgggacatgttgttatgtagtgttctgttggtgagtacctcaccgacaagatttattatattactattgttctttaaagtcaacggtttttcgaaagtttttttcataaggggcaaatgctgcacccttatgaaataccttccaatgtgacagtgttttcgaggtcttgtatgaccagaccttcgtctgtgaaaaactgtacgtttgcttcgcttccatctagtgtcagtatcgcatagctgcgctctttacgcattcttggcaggtgcacgctgcccgggttaataagcagtcttcctcttagcagctcactgcctgggatgtgcgagtggccaaagcagataatgtctgcgcctagctcttctgcacggtagtagacttgaagcaaggattgtttgatgccatgcagatgtccgtgagtgagaaatagttttccgcctccatcaagtgggagcaggagctcttcttcaaaatcgcccataaagtcacaatttcctttgacgactttgtatccttcgagtgctgggtggttcgtttcgagttctgaatctccgcagtgaatcatcatatcgacttcatccgcgtgccgtttggcaatggtttgaagttcgtctgtgagtccatgactgtcactcatgatgagtatcttcatggcttcattcccccttattcatttgcgtctagcagtgatgaaagcttttgaagcgcgaccgctcgatggctgatcttgtttttctcctctggtgataactcggccatcgtctggtctttgtctttgacgatgaaaatggggtcgtatccgaagccgttttcgccgattggttcctctgcgatgaagccttctactgatccttctaccgtctttgtttctttgcccggtatgctgacagccagggcacatctgaatctggctgtgcggtcttctttttcaattccttgcagttcgctcagcactttttccacattctcagcatcgtttttatgctcaccagcgtatctcgctgaatatacgccaggttttccgccaagatagtcaatcgacaaaccggaatcgtctgcaatgaccatttcacctgctttggcttgaatcgcctcggctttgatgatggcattttcttcgaaggtttgtcctgtttcttcaatctcttcagtaaagccgatgtctgctagtgttttgaccgtgaatccttttggctcaagaatggctttgaattctttcgctttgcccgcattgtgcgttgcaatgatggctgttttcatcctgatcaaacccttctttttattcgttgacttctcctgtcactgctttttgcttttcgattaattctttgatgcccttttcggctaaatcaagcagtccgtttagctgttctcttgagaatgtcgcttcttcgcctgtcccttgaagttcaacaaagcgtccagcgcctgtcatgatgacattcatatctacttcagctgaagaatcttcttcataatttaaatctaacagaagaccctgctgagaatcaattccgacggatatcgccgctaaataatcagtgatcgggttttctttgataactccttctgctcgaagcttttgaatcgcaagtgtcatggcgacaaaagcaccggtaatggatgctgtgcgtgttccgccgtctgcttgaatgacatcacagtcaatccaaatcgtgcgttcgccaagcttttctaagtcaacgactgcacggagtgctcgtccaattaagcgctgaatctccattgtacgtcctgtcacttttcctttagaagattctctcatcgttctttgtgcggttgctcttggaagcatgctatattctgctgtaatccagccttttccttctcctcttaaaaaaggaggtacgcggtcttcgatggatgcgttacaaatcaccttcgtatttcccgatgagattaagacagagccttctggatgcttaatgtagcctgcctctatttcaacttttcttaattcgtcatattgtctttcatctaatctcatgatttacctccattacgatatacattccgcgcgggtgccagcggggttctcctactaactttgacaacctaggctcgttctaatcgcttggaataaaaaagaggcagcgaatatgcatgcctctttttctccattatatcaatgtgtgccgttaaaaactacctgtattcacttgttctggtcttgaaaccggctttgtcagctctgctcctttttcgttcacaagctcagccttgccgtttaccttaaccgatacgcttttgacgtccggcagctctgttaatgtgagcacaatgctatcaagaactttttgtgaaatgacctttttcttttcatctgcactgccaaaaatggattcgttgaaatcaagtgtcacatgtccgtcttttactttcgggacatcattcagctttacatcttgatcaaagtctgtgagcaaatggctttttttgcttggtccagagacgagctcatcaatggctgctgtaatcggatcatcctcgtcttttggcgctcttttggtcacaggaacatagtacgtctgttcatcagattcagctaagtagtaaaccgtcactggctttgtcgatgtcatatcagcggcagcctcgtgctgaatatttataccgtcttctctgcttaaatcatcggagatcggtgtaccgttcacaggcatttcttttagttcatgtccattcattttcaatttgactttggcgacagaatcaaactgcgttaacgtccaagtgacagattgcaggatgcgctgttcgtcttcttttttatagtttttaaattcatttgaaaaatccactacggccgttccgtctttaatgtcgacagatacgctcgtgtcggccggcaaaacagctcggaacccatttggcatgaggttagaaatcggtcctccgtccacgagatattcaagggtttgtttggcacttccttcgtttttcggcagcggaatggattgagagacgacatacccgtttttatcaattaaatataattctctcatgactgtatctgccttcttctcctcttttccttctttggctgtttgtttatcttctttattttctttcacatatgtgacgttttgtggcgggtcaatctctgttttcgcttggtctgtttgaaacaatccgcatcctgacaaaagcatggctgacgcgatacacgtcacagctgctgtagatccttttttcagcatacttcaccctcctctagtagtttgtactactatgtatacgagctcctcatgtggattagacccttttcataaaaaataacccacctcaagaagaagcgggttattgctgatagacgtgttcaagtgatacggtttcgaccttccctgggaggtagccaaaccagtcacgagcgatgttttgaaaattttgctgctgccctgttgtataaaatgtatgaacaggtgcttcttgagaagtgtttaacagccctttatacgaaagaatcgtactggcttctctagctgtctcatcccctgatgaaataatgctcacatcactgcccataaagcgctgaatcggctcttttaaaatcggatagtgcgtgcagccaagaatgagcgtatcaattcctgtttctttcattggttcaagggaatctttcacgacttcatctgctgtctgatctaaaaatgtaccgctttccacaaatgggacaagcagcggacatgccagactttgaaccgctagtcctgcttttagggatagcagtgcttctttgtatgcctcgcttttgatcgtattggctgtaccaatgacaccaatctgctgattgtttgtcaccttgatggctgtacgggcgccgggctgaatcacgccaatgaccggaatatcaagcgttgctttgatttcatctagtgcgatcgccgtcgctgtgttgcatgcgatgacgagcattttaatatggtgatgtcttaataagtagtgtgccatttcccaagtatattgaagaacctcttcttctttccgagggccatacgggcaccgttttgtatcgcctacgtaaatgattttttcttttggcagttgtctcatgatttcctttgcaacggttaaaccgccgacgccggaatcaatgacgccgattggttgatccaacaaaatcgcctcattttcttttcatttgctgctgtagtttcgttaaggattgattgaaaacgatggcttcttcttctgagaaagcccctagaagttcactgacgtattcttggcgtttaacaatcacttcttgaatgatccgctcgccttcaggtaataaatgaatgcgaaccacgcggcggtcagaaggatcttttactcgttcaacaagttcacttttctccattcgatcaattaagtcggtggttgtactgcaagccaaatacatcttttgtgatagctcacctattgtcatatctccgaattcataaagccactgaagccctacaaattgaggaggtgtaatcgtatattgattcaggatttctctgcctttttgcttaataattgcagcaatatggcgcaatgatttctcaatctctgctacatggtcgaactcattcgtttccatttcattgatacctcactatagcatctcactttgattaaaacgtacactcctattttcctcgtttttcagagaaaatgcaagaagagactcatggaaaccatatagaaataaccggttcctccctagtgtggaaggaaaaccggctgactttagagctctagctcacccatacgcagaagctcgacgacggcctgtgaacgacctttgactcctagcttttgcatggcattcgaaatatgatttcgaacagtcttttcgctaataaaaagctcgcttgcaatttctttagttgttttatcttggacgagcaattcgaatacttctctttctcttttggttaatagcggcttggattgaaactctttctccttcaagtattgtaaccctccttgctaaggtgagagctctagtctctatagaatgggattctgtatagtcgagatatcatatgccgggtgcccgaggtaggtgacgttaaaatcgagaattcccgcatatgagcgtccaatttgtgcgcttttatccgcacaaaaaaggacgagtctcctatccgagacatcgtccttttcatacacgtatttaaaagatagaaatggctcctgttaacaaagcgatcaatgttgtaaaaagggctgttaacacagtccacagcagtgcgtatttttgcaaatcgccaatatctttgttcagcatactgacaagaagcagcgttgaagccacaagagggctcagcaggtgaacaggctgtcctatgatagaagcgcgcgcaatttccaccggatcaattccgtaagctgcacctgcttctgccaagattggcagcaccccgaaataataagcatcatttgaaagaacaaatgtaaatggcatactcgtcaaagcaacaatcagcgggaaaaatgagctgtaggaatccggaatcatgtaaatcaccaaattggcaatggactcaaccatttttgttcccgaaaagatccctgtgaaaatccctgctgcaaatacaagtgtgatgaccgttaatgcgtttcctgcatgcgataagattctctcgcgctgatcttcaacctttggatagttgatcatgagagcgatgacaaatccaattaagaagagtacaggtattggtataatatctaggactagtgtcgccatcaccgcaatcgtcaagaagaagttaacccaaatgaggttgggtcttttcatgtcttctactccatcttcgattgacgctgccaattcaggggagatcgaggcctcttctttgtactgaatctctgcaaccccaattcgtttccgctctttttttccaagcacatacgcagtaaaaagaataaaaagaccgcctccaaccattgttggaagtaatggaataaaaaattcaccagcatctaatccaagcgccgcgatggcacgggttgccggaccgccccaaggcgtcattccgctcataattcctaaagacaataatgaaatcgttcctaaaattaatgggttcatcccaattcttaagaaaagtggcagcattgctgatacggtaatcatataggttgttgttccatcaccatctaaagcaacaagcatagacaaaatcgctaccccaaaagcaattttgacaggatcacctttcacaatacgtaaaatgagtttaatcagaggatcaaacaatccagcatccagcatgacaccaaagaataaaatcgcaaataacagtaaagcagctgatggtgcaacagttttcagtccatcaagcatcatgtcccctaatcctttgttaaagccaccgatcaatgcaaatatgataggtacaacggttagagccaccaccggatgcatacgtttcgtcataataagaaatgtaaatgtcaagaccatcaagatccctaaaatagctagcactttatatccctccatcctcttctttacgcgatcagcaagcgcccctttgcacttgcgatgaatgttagcgctttctatttcaaggatataatagctctttttataatgaaaatattgattttttcgtatattctataaaattcttttataatcaaccttgctgacttcttaaaaactcaatgaatgctttcacaacagataaatgaagggagtctggctggtacataagccatgtatctcttaaaacgggctgtccatctttatacgaaagaccttttacaaatagctcatcacttggtctgaggcaaatttctgggacaatggcatagcctaaaccatgcttgaccatctcttttgatgtatcctgacggtctgtctccatcgtcacaagcggaggcattgtgaacgtttcctgccaccatctgttaatcaatcgttttaatgaactatctgtatgatagtcaatgagcggcagctttgggaggtctttcagctggatttctgattttgaaatgatacaaagccgctctttatcgagcaaaaaccgctctccattccagtcgtaatcccctcttaaaatgcctaaatgtacacttgatgtccctaataaatccatgacttttgtgctccagcctgtgtttaccataaattgaacatgtggatactgcttagaaaattcttttaaaatttctggcagcttatactgagcaaagttacttgagacccctaaccgaattgtccctttgacctttttttgcatattcagcatgccatctttcgtttgttggagctgtttgagcatgtcatttgcgtatttagccaagtactcgccctctgacgtaaattcgattcctcgttttcttttaaagaaaagcttcatatcaaactcctcttcaagctgtttcaatcgatagcttaaggcaggctgagagacaaataatttttctgccgcttttgtgatgttcttttcttcataaagcacctttagaaaccgccaatctttttcatccattatatgccctccttttttactaattataaaatatttttatcgattattctcaaaataatgtatttaacttatttcttattatactttaccattttgattagataaacagttcattaaaaaattgagggtgagagtaatgagaaaagttccaatcacaatcatgcgaggcggtacaagtaaaggggtattcattcaagcaaacaatgcaccatttgaacacgatgagctcgaggcatttctactagacattatgggcagccctgaccggctgcaggtcgatggaatcggcggcggtaattctttaacaagcaaagtggccattatcgataaagccacccgcccagatgtggatgtgaactatacatttgcacaagtcagcattaatgagagatttgtcgactttaaaggaaactgtgggaacatctcatcagctgttggaccatatgccatcattaaaggacttgttcaagcggtcgagcccattacgactgtacgtatcctcaataccaacacaaataaagtcattacagcagaggtcgaagtcgaaaatggagaagtaaaatttgagggacaggcagaaattccaggagtaaaagggacaggttctcccatttatttatcttttgaaaatcctgaaggtgctgtcacaggtaaaacctttccgactggaaacaaaattgatacgattcaaacaaagtttggagagattcccatctcgattgttgacattgcaaatccaattgcctttattcgtgccaaagatattcaattaaaaggaactgaattgcctgaagagtttacagacgaattattggatgatttagaagaaattcgttctatcgctgctgaaatgtgtcactttgcaccaaaagaaatggcgacattacagtctccagctgttccaaagcttgcgctcattagcgagcctgctgattatgtagatactaatggaatcttgagaagagcagccgatatggacatcatcgttcgtatgctatcgatgcaaagaccgcaccaagcacttgccattaccggctctgtctgcgtgacagccagctgtttcttggatgaaacgcttccggctcagctgtttaaagggcatgacgacacacttcgtattgggcatcctgctgggattatgcaaactgaaattgacatctctcaaaacagagtcaaagtcattcgaaccgcaagagaaattctagacggggttgtctttacaaaacaagactatatcgtgcagcctcagatcaaaagagaagcctaaagcagacgagaacatcgtctgctttttttaatgttgaagcggggcatcaatatctccagcagaatgagcttttatctgccctttctcatcttttaactggagatgaccgtagcggttgactccgcagcaaatgccttcttcccatgtttgtttttcacgatctaacgaaatgcgaaggggcttgttgagacgatataaccgtttgttatagagggcagtgagtgcttgaaacccttcattctgccagcgtgaatggtacttttcaaaagccgctgccagttctttcactagctgatcggctttcacctctgtcagctctgataagcaaatggttttgtacgggacatgctccggcttcgtctctacattgatgccaacaccgatataaatggaactgcggtctgcttcaattaatgtgccggatacctttgcttcattaatgagaatatcattaggccatttgatcgccagccgatcctccgctctcatgagtggtttcagaacatcatagattgctagtgctgtcagcggggcgatcgttgactgggtggagagttctgctggcggtaagactgtcatggtgaccgccacattccctaaaggtgtttcccacggcctgccgagtctgcctcttcctgctgtctgctggcgtgcatagacagcaaatgagggcttttctccttgctgcatgagccttttcgcttcattatttgtactatcaatggtgtcatattgaaaaatcttcatgtgttctcctcttgtttcttcttgatatgatgcttttattataacaaaatgaagcgtgcatgttgatgagccagcatgttactcatttcgctgcgcctgaaacgtctctttttcttcctctgtaaacgggacagatgcgcctgtgtctttactaatttgcaccatggtgactgagcctgtaaagcaaggttcctgctgctcattttctcctaaataatgaaggatgagtgagcttgatccgaccttttccggcttgacatacacacgaagcctctccccaatctctacctgcttgatgtaatcacattgcaggtttgcgacgactgtaatggtctccctcacacgtttcatccgtttatcaacaattcccgtcttttgaaaaaaggcaattcgtgcctcttcgaaatacacaaaaggggtgacattgttcatatggccaaacatatccgtttctgaaaaacgaacggtggtttcgacataaaatcgaaaggatgccctccactcttcaaatggttcttcaatatatgacggcagtctcacttgatcatctccttatttggaaacaaaacgcctctcccgtattggaagaggcgtttgtttatatgttgcatccagcctcttaaacactcatcatgattggcaaagaggactgaatgtgatgttattctgcgtgatcgcttccgaagaagttacggaatgcttgtaaagttgtatctcggttaagtgctgcaattgacgttgtcagcgggattcctttcggacaagcctgcacacagttttgggagttcccgcagttcgcaagaccgccgtcccccataatttcttctagacggtcagacttattcatcgcacctgtcggatgtgcgttaaataaacggacttgtgaaagcggtgcagggcccataaaggaagacttatcattcacgtttggacaagcttcaaggcagacaccacatgtcatacatttagaaagctcatacgcccattgacgttttttctcaggcattcttggtccaggaccgagatcatatgtgccatcgatcggtacccatgctttcacctttttcaaggaattgaacatccggcttctatcaacctgcaagtctctcacaaccgggaatgtcttcatcggctgaagacgaatcggctgatctaactgatcgatgagtgctgtacatgactggcgcggtgttccattaatgaccatggaacaagctccgcacacctcttcaagacagttcatatcccagttaatcgctgttgttttttccccttgtttattgaccgggttccgtcttatttccataagggcggaaatgacgttcatatttgggcggtaagggatttcgaattcttcatcataaggctttccatctgctgtatcttgacgtgtgataatgaattgaatcgtgtttttttcactcatcttatttctccacctttttcttcgagtaatctcgtttacgaggtgcaattaacgatacatcgacgtcctcatagtggaatgcaggcttttgatttttccctttgaacgtagccatcgttgtttttaggaattcttcatcgtttctctctgggaaatccggtttgtagtgtgcgcctcggctttcattccggttgtatgccccgatcgtaatgactcttgccagctgaagcatgttgtcaagctgacgtgtgaaggcagcgccttggttgctccatgaagctgtatcgttgatgttaatctgcttgtagcgctccattaattcttcgatcttctgatctgtttttaagagtttgtcattgtaacgaactactgtgacgttatccgtcatccattctccaagctctttatgaagcacgtatgcattttctgttccgtccatgctgaggatgttgtcccatttctcctgctctttcttcacagcgctgtcaaatgttgcagaagataggtcttccgcagatttttcaaggccgctaatgtacttgaccgcatttggtccagcgaccatcccgccgtaaatcgcagaaagcagtgagtttgcaccaagtctgtttccgccgtgcatagagtaatcacattctccggcagcgaatagacctttgatattcgtcatttgatcataatcaacccataatccgcccattgaataatgaacagcagggaaaattttcattggaagcttacgcgggtcatcacccatgaacttttcatagatttcaatgatgccgccaagtttaatatcaagttcttttggatctttatgagaaagatcgaggtataccatgttctctccgttgatgccaagcttttgctcgacacatacgtcgaagatttcacgcgttgcgatatcacgcggtacaaggttcccgtatgctgggtatttttcttcaaggaagtaccaaggtttcccgtctttatatgtccaaacacgtccgccttcaccacgagccgattcactcatgagacgaagcttgtcatctccagggatcgctgttgggtgaatttgaatgaattctccatttgcgtaatgagcaccttgctgatagacgatggatgcagcagatccagtgttgatcatcgagttcgttgatttaccgaacacaattccaggaccaccagttgccatgatcactgcatctgaacggaaggattcaatttccattgtcgtcaagttctgcgcgacaatgcctcggcatacttcctcgtcatctaacacagcgccaaggaattcccagccttcatatttcgtgacaagccctgctacttcatagcggcgaacctgctcatctagtgcatataatagctgctgacctgttgtagctccagcaaatgctgtacggtggtgctgtgttcccccgaagcggcggaagtccagtaatccctctggtgttctgttaaacatgacacccatccgatcaagtaagtggataatggacggcgctgcttcacacattgcctttactggcggctggttcgctaagaaatctccgccatacaccgtgtcatcaaaatgctcataaggtgaatccccttcaccttttgtattgaccgctccgttgattccgccctgtgcacagacagaatgcgaacgtttcacaggtacgattgaaaatagtttaacagctgttcccgcttctgctgctttgatagttgccatgagaccagctaagccgcctccgacaacgatgatgctagaattactcattgtagcccctctccctcttctactaatctatttcctcttaaacaaaagcgaaaattgctcttagccctacatatgaaagcgctataaatatacctaatgtcacatatgtggagattctttgtgagcgtggtgaaacagtaattccccagctgacagcaaatgaccacaagccattagcaaagtggaaaatagtagataaaacgccgacaatatagaagcctagcataaatggagagcttaaaatattcgccatcatgtcatagttcacttcagctccaagctgagcttgaattcgtgtttcccatacgtgccaagtgacaaaaattaatgtgatgatacctgaaatcctttgcagtctgaacaaccagtttcttaagtaactgaagcgagacgtgttgttttgtgccgtaaaggctatgtacaccccataaacagcatgatagatcagtggtaagaaaatcacgaacagctcaagtgcatatctgaatggaagctgttccataaagtgtgcagctttgttaaacgcctctggtccattcgtcgcaaagtggttaatcactaagtgctgtactaaaaatagaccgaccggaatgacgccaagcaaagaatgcaatctccgataaaaaaattctttgttccccgacattactttaccccctagtaaaaagtgcaattgctgaaaattgtcttacccccgcttctttcaattgtaagcactttattcaaatttattgacaatttcattttactcctatgtcaaaaaagcgtcaagaaaccgcgtacataaattaaaattttccgaaatttaaaagttttaaatcaaaattcgttttactacaataagaatttcttagacttcagggaaaactctgtcatcatatgcttacataagctataataaattgttgaaagaggggagccgtacaatgaataaattcgaatctaacttagaacagctaaaagaaattgaagtcaatggatttgcctacgagctgatacgcgaagttctgctgcctgatattttgggtcaggatcattcaactatgatgtattttgcgggtaaactgcttgctcgtaaatttcctcaagagtcatgggagaagatccccgaatttttccatgatgccggatggggaacgctcacgatggtccattcgaaaaaacaggaaattgagtttgagctcgaaggtccacttgtatcaaatcgactcacctatcaaaaggagccatgctttcagatggaagcgggttttattgctgaacaaattcagcttctcaacgagcacgtggctgaatcttatgaacaagtgaaaaagcgtgctgataaagtcattttaaccgttaaatgggatttaagagaccctagctaacactctttatgaaaggcgcggacttcaggtcacgcctttttgtagtcttcttctatcatagcatacttagtgaatgggtttacgcacgttttcctttcttgtatgcggcggtttcgaatataaaaaagaggagcactcttttaagagatacacctccctgcctgtttaagaatgggcagctacctttgataaatcaaacgcatcgtgcagtgcttctactgctttgaccatatcgtcacggccaacgactgttgagactttgatttcagacgtactgaccattttcacttgtatgtctttttccgctaacacagcgaacatttcagcggctacgcctggatttgaaaccataccagatccaacgatagatactttggctaatttactttctgtctcgatctgttcgtaaccaagcgctcctttatactcttctaatacttcaactgttttggacaaatcatccgttttcacagagaaagagatggacgtctgattggtgcttgtgacggactgaatgatgatatcgacattgatattttgcttcgcaagcgtcgtaaagatggtcgacaatgtggtgaggccgcttgaaagaccgcacaccgtcacgcgtgtaatctgatcctcaaatgcaatgcctctgacgactaaattttgttccatggatgattcctcctcaattaacgtacccgattcattttcaatactagaacggacttctagtgggacttgataattttttgcaaattcaacagctctcggatgcaagacgccagctcctaaattagccagttcgagcatctcatcgtatgaaatacctgcaagtttccgcgcggatggtacataacgcggatctgtcgtaaacactcctggtacatctgtgtaaatatcacatttatcagcctttaatgcggcagcaagtgccacagccgttgtatctgatccaccgcgtccaagtgttgtgatatgtaagtcatctgcaattccttggaagccagctacaacaacgacttttcccgcacttaattcctcttttattcttgattcatcaatatccacgattcttgcgttaccatgtacttgctctgttttcataccagcctgccagcctgtaaaggaaatggcatcatagccttttgcttgcagcgccatcgttaataaggaaatggtcacttgctctccagttgcgagcagcatatccatttctcttttgcttggatgatctgtgagttctttcgctaggtctactagaacatccgtagatttgcccattgccgacacaaccacaaccacatcatgtccggcctcgcgttcagcgatgactctctctgcggcattgcgaattttttctgttgatccaacggacgttccgccaaatttttgtacaattagtcccatgtctaccaccctttttcaaaagatcacgtgtgagagaagaggcaagaagcggctttggagactgcctgctcactgcaaataaaaaagcaatgagagaacagatctcccattgctttaaaatcatcattaaacgatgcaaacaatgagatagccctccaagaaatacattcttgacagccctacatttcttcaatgtacagccagcgaataaaatgagtggattttattcacttcggcgacgctcccctttcagccctcttcctagatcccatcgatctctgaaggcttactcttgaagttcgcacctctatcttcaacaaacaacacgttcatttattaaatttagtcacaatcttaacagacttttggaaaaagtacaatctatttttttaatgcttccattaaaagttcggccgtctgtttcgggatgccagcctcctgaaagtcttggatagaggcttctttcatctttttcacagagccaaaatgtttaagaagttgttttttacgcttttctccgatacctggtacatcgtctaaaatagattgaaatgcattttttccgcgcagctgcctgtgaaagctaatcgcgaaccggtgcacttcatcttgaatgcgctgcaataaatagaaggcctggctattccgctccagcgcaacaatttctagtgtatctcctatcatcagattcgaagtccggtgcttttcatctttcactagacctgccactgggacagacagattcaattcattttcaagcacatctatcgctgcattgatctgtccctttcctccgtcaattaaaattaaatctggcagcggcagctcatcctttaacacgcgggtatatcgccttctaatgacttcacgcatagatgcataatcatctggccctgtgacggttttaattttgtattttcggtattcctttttatacggcttcccgtcctgaaagacgaccatggcagaaaccgggtctgcaccttgaatattcgagttatcaaatgcttcaatccggtacggcatataaatatttagtgcatccccaagctgcttcaccgcaccaatggaccgctcttcatcacgctcaatgagcgaaaatttttcttttaaggcgattttggcattttgatgggcaagtaaaagcaaatcctttttctttccttttttcggctgatgaacgttcgtctcgagcaattgttcaatcatctcttgatctacgctgtctggcaccaaaatttccttcggcagaaagtgattgttctttgcataaaattgccccataaacgtgaggaactcttcctcagggtcttgatacataggaaataggctgacatcgcgttcaatcaatttcccctgcctgatgaagaagacctggacacacatccagcccttgtcataggcatatgcaaagacatctcgatctgataaatcgctcatcgtcattttctgcttttccatcgttgagtcgatgtaagcgatttggtctctcagttcttttgcccgttcaaactctaattgttcggcggcttcctgcatcttttcgtttagttcttttttgatttgctgatgccctccgtttagaaaccttgtgatttcgtccacgagctgcttattcgtttcttcagaaatgtcatatacgcacggcgcgagacattgtccaagatgataatatagacagacgcgatcaggaagggttgcacattttctcagtggatataaacggtcgagtagcttcttcgtttctctggctgcttgtacgttcgggtatggtccgaaatatttccctttgtcctttttcacattgcgggtgacgatcagcttaggatgccgttcattagtaattttaataaaaggatacgttttgtcatccttaagcatgacgttgtattttgggtcgtattttttgattaaattcagctctaaaatgagtgcctcgatattagaagaggtgacaatgtattcaaagtcctcaatttcactgacaagccgctgcgttttggcgtcatgagatcccgtgaaataagagcgcactctattttttaagacctttgcctttcccacataaatgactgtattttgtcgatctttcattaagtagcagcctggttgatctggcaagaccgatagcttttctttgatcagtttgttcatattttcatccgtccttgttttcctctttcactccttctagtgtatcacgaacatttgttttataccatgttgaaagaaaagcggctctcgtctttacgagaaccgcttcagtgagtatgccgctcgggcatagacaggtttatagatgtttgttgacaagttcagcaagtgcttcttttggtttgaaaccaacagatgtttctaccacttcaccgtcttttaaaacaagaagtgttgggatactcatcacgccgtatttaccagcagtttcttggttatcgtctacatcaatttttacaattttcattttgtcgcccatttcttgatcaagttcttcaagaactggagcaatcattttacatggtccgcaccatggtgcccaaaagtccgcaagaacaacaccttctgcagtttcttgtgaaaatgttgcgtcagtcgcttttacgattgccattattcattcctccaatgtaaattatgctttttagtatagcatctaccaatgtgacttgcgaatgaaatgcttacgaatcattttttatgaaatgaattaaaaaacaaaccgtacaatcgcaccaatgacaacaattgcaccgataatcatgagaatcgttctaagcatataaataactccctttccgcttcatttacaatgtatgatgccccaacatcctgctcatcaaacatctaaatatgcgatcaagccagatcgaccgtgatcatcaccaccgacattggcggcagatctatggtcaattcaccgggttttacagcaaattgctgaaactctgctggctggacagcatgaggatcgtcaaatgtgttgtgcgcattcatgcggtccgctgtcagcacgcggcccgtgactttcgtttgagcatccaaaccttcaatggcaagggatacttcgttttgttcatgcggattcaggtgacagaagctaatatgcatcttatctgacgaacgcgaagctgacacactaacctgaggtattttttctcctctgcgttcataaggcgttgacacaaactccacttcaagtgcttcttcctcttgatgcacttgaaacatgtgaaacacatgatacgtaggcgttaggagcatcttttcgtcttccgttaacaccattgcttgcagaacattgaccgtctgggcaatattcgccatatgaatccgctggcaatgacgatgaaatatatgaaaatgcagagcacaaacaagggcgtctcttagtgtgttctgctgatacaaaaacccaggatttgtccctggctctgggtcataccatgttccccattcatcaataatcatcccgattcgcttgtctggatcataacgatccatgatctctccatgatccacgacaagccgttccatctcataggcttttttcaacgtgataaaccattcatcctcatcaaattcagtcgctgacccttttttctcccatgtaccgggtacagtgtagtaatgcaaactgagtccatccatccaaggtgcggcccgctccattaatacttttgtccaattcacgtcatttgaatttgcgccgcacgcgattttgtatatcgtctgacccgcaaactctctcacatacgtttgataacgtttatataaatcagcatagtattcaggcgtcatattcccgccgcagccccagctttcattgcctacaccaacataggtcagcttccaaggttcttgttttccattttgaatacgccaatcagacataggtgttccctttggaaatgtaatatactcgacccattctgctaattcttgaacagacccgcttcccacattcccgcaaatataaggctcacattcaagcagctcacacaatttcataaattcatgcgtaccaaatgcattggattcaaccgtgccgccccaatgagtgttcaccatcggttttcgttcactgagatcacctacaccatttgcccaatgatactcgtctgcgaagcaaccgcctggccacctaagcaccggaatatgtaatgcctgaagagcctttagcacatccgtacgaatcccctcaatatgatcaatcgctgaatcttttcctacccaaatcccgtcataaatccctcttcctaaatgctcttgaaagtgtccatagatgtgtttagaaatacgtccgatcacgtcattgacttttactgtccccttcacttgtcaaccgctcctttgtttattgattacatacaaaaaaacccagaatacctaggcattctgagtgtatgagcgttacgagtggatattcatcttttttaactcttcattcaaaagcggtaccacttcaaacaaatcaccgacgattccataatcggcaattttgaagatctcggcttctgggtctttgttaatcgccacaatgactttactgttagacattccggctaaatgctgaatcgcccctgatatcccgcacgcaatatagagatcaggtgtgacgaccttacctgtttgcccaatttgcagggcataatcacagtagtctgcatcacaggcgccacgcgaggcaccgactgctgcgcccagcgtttcggcgagttcattcagtggttcaaacccttccttgctcttgaccccgcgtcccccggcgacgatgacctttgcttcagataaatctacaccttctgacgtttttttaatgacttccttcacaatcgttcgcaggttctgaatatcgacagaaacgggtgtaatgtctccgcttcgtgaggcatcccgctcaagaggtgccacgttgtttggccgtatggtcgccaaaagcagacgatctgttgaaatcactttttcgaaggctttaccagagtaaatcggtctagtgaaaacgaggtgttctccggtaacgcttacatcaatcgcatctgaaattaggccagtctgcaagcgtgcagctattttcggcgacaagtcttttccgatagacgtatggccaaagagtacggcatctgggtcaacctgatctaatatcgcttgaagcgcctgcgcaaaaccatctgatgtatagtatgaaaggtgcggatgctccacaatcatgacatgatccgctccatagtaaagcagttcattcgctaggtctttgacgtcttcccctattaacacgccaatgacttcaccgccatctgccacttgatgagcggcagcaatggcttcaaatgtcacatttcttaatttaccgtcacgactttctccaagtacaacaacttttttactcatctttcaagttcccccttgttctcgtgatatcgtaaagcggatgtttagatgacctttgcttcgtttcttagtagatctgtcagttctttgacttgatcctgaagctcaccgctgagcaccttgccaccctcttttttctccggtaagaaacgttcaattgttttgattttatatggcacatcgtcttcatcaagatctaaatcatcaagttccacttcttctaaaggctttttctttgccttcataatgcctggtaatgatggatagcgaggctcattgagtccttgctgggcagtgacgacaagcgggagctcggcagaaatgacttccacgtcaccttccgcatctcgttcaatcgaagcagagcctccgtcaatttgaatacttgtaatcgttgtgacatatgaaaagccaagtaattcagcaagacgcggggcaacctgtccagagcccccgtcaattgccacgttccctgctaaaattaaggaagcctctttgtcttttaaatagtggtaaagaatcgtagaagctgaatattgatcccactcttctaagtcgtcttccacatttaataaaacggcttgatcgcagcccatagcgagcgctgttctcagctgcttctccgcatcctcactgccaactgtcacaacggtcacttctcccccgtgctcgtcacgaagctggatggcttcttctatggcgtactcgtcataaggattaataatgaactctgctccatcttcttgaattgcaccagactgaatggaaatcttctcttccgtgtcaaacgtacgcttcatcaaaacaaatatattcatccatttctcccccttgtgtcgttctaatcccttattcccctttaaaattcggtttgcgcttttcgataaaggcttggataccttctttggcatcattcgattggaaaatctcaccgaactttttggcttccagtttcattccgccatcatatgaatacaattttgttgcgttcaataaatccagcacatactcgagtgattttgggcttttcgttgcaaattttgccgcaagtgttttggcttcttcaagcgcctcttcctctgtttctgccagctttgaaacaagtccgcaggcgaatgcttcttcacctgtaatcggttcagctgtacccatcatttccagagctttagccgaaccaacatagcgcggcaggcgctgcgtgccgccgaatcctggaatgatgccgaggtttagttccggcagtccaagcttcgcatcttttgttgcgattcggatatcacaagacattgcaagctcaaggcccccgcctaatgcagctccgtgaatcgaggcaatgactggttttggacattgctctatccgttcaaagacctgctgccctctgtctgcaaggcttgaatagtcagactcttcctgtaacgtcgtaaattccttaatatcagcacctgctgagaaaaatcttccttctccgtggatcacaatggctcttacttcttcattttgttcgagctggtcaaacatgtcatttagctcggtgagcagctgagaagataaggcgtttgctggtggatgctgaatcgtaataagtgctgtctgtccttcatgatgtaaggtgagtatcttttccatgtcaatcatcctttttcaaaatgtctttaagattgatgtattccgtttaagagtagatcacgtacgttttctgcgagtgcaggaagatcatatttttgatcattcatgacccatgttgtagcggtctcatcaatcgtcccaaataccatttgtctcgctaagcggacatctagattttgtctaaattctcctgttttctttccttctgctaaaatcgactcgagcatatttaaataccctttcagcacctcattgattttttgccgcagctcaaggtttgactgcctgagttcgagctgtgtcacaagagccaaatgatgattttgcgcaagcatacgaaaatgctcctcaatgagcagtaaaagcttttctttcgccgacggtttcttttgaatatctgtttccatccgttcgatgaattgtcccattttttctttgaacaatgagatcaaaatatcctctttatttttgaaataaagataaatggttccgtctgctacccctgcttgtttcgcaatctttgaaacttgtgattgatgatagccgttctctgcaatcaccacaactgctgcatcaataatttgcatgtacttcggtcttttctgcttcaatgtgcttcgtccctttctaaattgaatgagtattcattcataacttcatgttaaaaagaaacgggcgatttgtcaagtgatcttcttgtttcttttccacctttagcataacagagcaggcggtcaacattcaaatcatccggccggtggaccggatgatgcagaccgttatgttttcggttgatcggcaggcgtttcagatgaagaagcgtgctttcttttttcttcttcaattaatactctgcgcaaaatcttcccgacggctgttttaggcagtgattctttaaattcatacacgcgtggtactttaaatgaggcaattctcgtcctgacaaagcgatcaagttcgtcctctgttaagtaggcatcctttttcggcacaataaatgctttcactgtttctcctctgtacggatctggaatacctgcgacgacgacttcttgtacaagctcatgctcataaagggcttcttcgacctctcttgggtaaatattatagccgctcgctatgatgacatcttttttccggtcgacgatatagaaaaaaccgtcctcatccatataccctatatctccggtgaaaaaccagccatctcgtaatacagccgctgtctcctctggctgattccagtatcccttcatgatctgcggccctttgacaatgatttctccatgctcatatggttcttttaggcctccagtttcctcgcaataaataccggcatctgtattaggccacggacagccaatgctgcctgttttgttcgctccccataaaaagttagcatgggtgacgggtgaggtttctgaaagtccatacccttccactaagcgtcctcctgttaatttttcaaagctttgtttgacttctacaggaagtgccgctgagccgcttagacatgcagtgatggacgacaggtcatacttttcaatgttcggatgatgcagcaaggcgatatacattgttggtgcgcctggaaatagcgtcggtttctgtttttcaatggttttgagggtatctgcgacatcaaagcgtggaagaagaatcaattgatgcccttctttgacagcaaggtttaagacggtcgtcattccgtagacatgaaaaaacggaatgatgccgaggatgcgttctttccccctggtcgttttgtacatccaggaagcgcacatttcagtattcgctaaaatattttcatgtgtgagcatgaccccttttggtaaaccggtcgttccgccggtatattgcaaaacagcgacatcctctttcggctcaaaggcaagtgcgggaatttgctgttcacctgccgattctttcgtgatctgcgagaagtgatgaatggtgtcatttttctccacttggatgaccattttattttttcttctttgcacaataggaaacagtatgtttttcgggaatggtaaataatcttgtagtttggtaatgattaagtgttccatacttgtcagcgctttcattttataagcctttggatacaacagatctagcgtgatcagcactttggcgccgctgtcctccatttgatattccagttctttctccgtataaagcgggtttgtttgaacaacgatgccgcctgctattaaaacagcataataagaaatgaccgattgagggcagttcggcagcatgatcgctactctgtcgcctttttttacgccaattttcatcagatgactggctagtttcaatacgtctttttgcagctgttcataggtgatgttctttcctagaaaatgaatggctgtatgctcaggtgcagcctctgcggagctgaataagtaagattgtaatgtttcatttgggatggtgagttcgtggggaatttgattcgggtaatgcagaagccaacgtttatctgactgcataaaaaccctccttcctgaactttcgtactattttattatagcaaacttttccttaggacagtttgcttttttctaatagagcttggttcaattgcacacttttactttttcgccggtgtttctatagaggctctttttccttcatgatgccactgttcatataaaccgccgattgcacgaaatgactcgttgactctttccacgatctgttgatggatactagggtcattcggtaaatgcgtctggatgttgtcgacttgatgcttcctcatcatgtcaatgtaaaccgtgagaaaaatggtgtcttctaaaatccagtaaataacttcatccgccacttttgttcttttatgcagcattttcatccctcgttcatattgaatgaggatataaccactcgaatcgatctgaatatagggactcaaatcatcaaaaaatcctgacgtttgaaatggacgtgcaatatacggttcgtatatgtctcttggaagggatgtcatttgaagacaagtatcaatgcgcttgatcagttcgtctttttgcagaatgtgcttcatgtcattcgccgcctttgatgagataaaagctgccaaggggttccctgacagctttctaacgttgtttttttcatttcacaggaacagataaacggcaccaatgaccgcaaaagtgcaggcaactacgattaatacttttgctagcttttccatgtcgtctccttaaatgccggctgctactacgtaagacagcccaactgaaatgatgagtgaaataaacccgaccgctctattatcattttcaatctctttgtctactttaaatcgcggtgttaaaaattcaaaaatgaaatagctgacaagcagcatcacaaagccgtatacgccccatccaaccatttgaagaagggaattgtgctgtgcgatggaatgctgaaacacattcgcaatcccaaagatcttcccgcctgttgccatagcaacagctaagttcccccgctggatctcttcccagtttttataggaggtgacgagttcaaaaatggttagaaataagacgagacataggacggccacgctgtaataggcggcaatttccacaagttcattttcccaaaaggctttcatgcgttttctcctttttactttaattcgacgatggtgacgcctgatcctccctcaccttgttcgccaaaacgagcatttttcacacttcggtgctgtttcagtaattcctgaaccccttttctgagggcgccagttccttttccgtgaataatcgacacgcgcggataaccagctaatacagcatcatctaaatatttttcgactctgcttaaggcattttcataacgctctcctcttaaatcgagctcaagcgagacatgatagtctttccctttgactgccgtgatggctttttcttgcttaaattcaggtgctgatttgataaattccatgtctttttcttttactttcattttcagaatgcccatttggacactccattctttgtcacctgtttgttcaagcagcgttcctttttgcccgaaggtgagcactttgacttcgtcgcctgacttcagctgtcttactgcttttttcgctggctctggctttttcttccggtcaaactcagggaccgcttcttcaagacgctttctcgcatcgatgagttcatgctctttgaatgagcggtgctcactttttatcgaacgcagctcttgaatgatatcttctgcttcttttgatgcttgttcaattttctctttcgctttatgttcagcttcttcgagcagtttgtccttttgctcattccattcaagaatttgtctttgcaattctttatgaagcttttctgcttcttttctatagacttctgtctcatgcagttcttcttctgcttgtttcttgctatcttctaatgacgcaatcatttggtctacttcattatgctctgcatgcatatctgcttttgcccggtctatgaggtggtcaggcaaaccaagacgtttggaaatttcaaatgcgttacttcgtccaggcacaccgatgagcaggcggtacgttggtgataaagtttcaatgtcaaactccacgcttgcattcgtgacgccttcccggttatacccatatgccttcagctcgggataatgagtcgttgcgatgacgcgtgcattcgtttgatgcacttcatctaaaatgctcatcgcaagtgccgcaccttcagctgggtctgttcctgcccctaattcatcaaataacacgagggagttagatgtcaaatgctttaagatatctacaatattgaccatatgagatgagaacgtactcaagctttgttcaatggactgttcgtctccaatatcagcaaagacttggtcgaacacagccacttcagagccttcttcaactggaatatggaggcccgcctgtgtcatcagcgtcagaagacccagcgtttttaaagtaactgtcttcccccctgtatttggtccagtgatcacgatcgttgaaaaatctttgccgagctcaatatcatttgcgacaacttgatcccgaggcaatagaggatgtcttgctcgttttaaatagatctctccttgatcattcacagcaggctttgtggctttttctgcctttgcatatttagctttagcaaaaataaaatctagcgtctgcagctcctttacattgtgaagcagttccccaatgtgctctgacacgctctctgtcagcatttggaggatcttttcaacctcttgcttctcttttaaacgggtttgctgcaaggtgttatttacatccacgaccacttgcggctcaataaaaagtgttgccccagatgatgattggtcatgaacaattccgccgtaattcgagcggtactcttgtttcaccggaataacaaaccgatcattacgaatggtgacaattgtgtctgacagcattttcgaagccgattgtgaacgaatcatcgattctaatttatcacgaacctttgattctagtgagcgtaattgaatgcgcaatgaacgaagtgcaggggttgcatgatcaagcacttctccattatcaccaatacagctttcgatttcttttctgatttcaggcagtaatatcagcgtctcagcatatgtatgaaggcgcggtatgtctactccatcttcatacatggacgtgagaaagtgcttcatatttttcaccgcatataatagtcctgcgatttccatcagctcagatgggcttaatgtactgccgatttctgcccgtttcactgcgcgtctaatatccgttaacccgccaaatggcgcagacccctttaagcgaatcacatcttgtgcttctgctacctcttccagcaaatgctgaatggtttctatatccgtcagaggtgttaaatcctgcgctctttcttttcctaatgtggatgcggtataggacatcactttttcttttactttatgaaattctaatgatgctaacactttttgttgcagcatggtccagcctcctaacgactacctgtcacgcgttaaaaactttttgatctcgtttagagtaaaagtattcacgacatttgcttttggtgtccagccttttcttgcagctgttacaccgacttccatatgttccagcatggcgatgttgtgcgcatctgtattgatcatgatgttcacacccgcttcatttgctttcattaaatgctctgttttcaaatcaagtcttgacggattactgttgagctcaagtgcagtgcccgttttcttcgcaagctctatgagctgatctatatttagggcatagccatcccgtctgccgatcaaacggcctgttggatgtgcaattaaatcgacatgctgatttcgcaaggcattttcaaggcgttccataatgacttcctccggctgagagaagctagaatgaatagacgcaatgacaaaatccatgtcttttaaaaagtcatcatcataatctaacgatccatccggcaggatatccatttcgacccctttgaaaatgtgaaaatgctcgaattcctgattaagcttgtcaatttctttagcttgcagacgcaaacgttcttttgttaaaccgttggctacttttaaatattgcgagtggtctgtaatggccatgtattcatagccttttgcgatacatgcttccgccatttcacgaatagagaatgctccgtcactccatgtcgagtgcatatgaaggtcgcctttgatatctttcagttctacaaactgcatactttctttatacgtatcaatctccgctccggtttcacgaatttctggcggaatgagcggaagttgaaaatgcgcataaaaagcgctctcgtcttcaaacgttttcacttctccagtttcaatcgtttccacaccatattcgctaatgcgctctccgcgttccttcgcaagctgacgcattcgaatattgtgatcttttgatccagtgaaatggtgcagcgtagtcgcgaattggtctgatgtcacaagccggaagtccacactgatctcaaaatcaagggcaagaatgacagataccttcgtatcaccgcttgcgatgacatctttcacatcatcaagtgcaacgagctgctctctgacttgctcaggatcatctgtcgcaatgatataatctaaatctttcacggtttcacgtgcacgtcttaaactgccagctcttgaaaaacggatgatacctttcgtctcttcaagcgcatgatcaatccgctctgccacatctaatgcaaagccaattggcagtcgttccggctgctttcccgcttcctcaagagccgcgagaatcttttcttctgtttttttgccaaagccagcaagtgcttgtaccttttccgcttcgcatgcttctcttagcgactgtgcatcgtggacgccaagctcttggtaaagcttagcgatcttcttcccgccaagtcctggtaattttaagagcgggacaagtccttcaggcacttccttttttaattgttcgagtgtttctgattgtcctttttcaatatactcagtgatcacagcgaaggttccttttccaatgccgggtaatgctaatagatcatctatttgagaaaggctgcggtcatcttgttccagtgccgctgctgctttacgaaaggctgaaatcttaaaaggattatctcctttcagctccatatatactgcaattgtttcaagaagtttgataatatcttttttattcatctctcatcctccagccgctttggcatcttcctttataaatatacaaacttttccttcatcctacaactttctgtcatggaatgagaaaaaacttctccaagaaaggagaagtttttaaactccatacgtcgtccataagtctttgacaagactggacagataaggggtgttgcctacgatcacatctgctaatatggatttgctcatcattgtttgcagtgcatcgactggaagtaatgcagcgacaaacaagagaataaacacaaatagataggtttcaagaaatcctaaaacaccgccaagcagtttgttgacctgcttaatcacaggtatacttgcaatggttgtgagcaatccgccaatgatggcgagcaggattttggtcaagataaacagaatgataaacgcaatggtattataataagctgtttctagattcccactaaagaaagcgagctgcgcttgaccgccgctaaaattaggcgctggaatccacgtaagctgtggtgcaagtgactgataaaacatggaagccactaagatagaaacaacaaagctgatcaatttaatcaattgaagaataaacccacgttttagaccgacaagcgttcccataagaagcaaaaacaaaatgatgatatcgatcacggtaatttcattccttttctttaagctgaatctctagtttttcgtattgctcttttaatttcaagtagtcgtggacgacattgactgctgtcagtacagctaatttgtttatatcaaggtatggatttttttcatttatttctctcattttatcatcaacaattgaagcaacgtgtcgcatatgcatcttcgtttcttgaccgatgatcgtataggactgtccgtaaatctcaactgttgttttcgttttaccgccgtcagacaacgtttctcctccattccacgagaatcctagtctctatcataacatgtttagacattgaatggaaagacgagcccttccctgttatggtacactttagaaatcaatgatatcaaggtaaaaaggagttatccactgtgccccaatccgtcttaaaagcaacatcagaagaccttaaaaagatgaagagcgcgtatgcgcaccacttaactgatactttaccaccaggcgccctttttcaagcaaaggttcctggctgtacgattacagcctatcgatctggaaaagtgctgtttcaaggacaaaaggcagaagctgaagccagtcaattcagccatttaaaagcagctgatacgaaaagtcaaaaagcacctgctgtcacaaaatacagtccgccgtcaggaattgcttctatgtccgtcatcggttcagatgaagtaggaacaggtgattattttggaccaatgacggtctgtgccgcctatgttgatgcaagccagcttgctctcatgaaagagcttggcgtaaaagactcaaaaggtctaaaggacccgcagattatcaatattgccaaagatctcatcaaaaccattccgttcagccttctcgtgctccgaaatgaaaagtacaatgcgatgcaggaaaagggcatgagtcaaggaaaaatgaaggcgctgcttcataaccaagtcattacctctgtgctagaaaaactagacgggaagcagcccgaagctattttgattgaccaatttgcagaaccgggcatttatttcaagcatcttgcagggaaaaaaatcattcgggagcggacgtactttagcacgaaagcagaaggcattcatttgtcagttgctgcggcttccattattgcaaggtacgcctttttaattgaaatggataagttgtcaaaagcagcaggctttgacattccaaaaggagccggtcctcatgtggacaaggcggcagcgaagctcatcaagctgcacggcgaagatgctttacgtcaatttacaaagctgcattttgccaacacacaaaaagcgaaaaaatggttataaaaaagagctaaggcccataaggccatagctctttttttctttaaccgcgcaagacggcttgatacgtatcttctaatgctttcaatacttttgtatgaacagccgtcacttcttcctctgtcaatgtttgctccggatttaaatattggagagagaatgcaacggattttttgccttcttccatatgttcaccctcatacacatcaaagacggataggtctgtcaataaatccccgcctgcctcatagatgacccgctccagctgtccgcttgagatatgctgatctacaacaagtgcaatatctcttgtcacagcagggaatctcggaatcgctgtatatttcatatccttcgattcagacgtcatcacatctgttaaatcaaactcgaagacatatgtttcttttaaatctaattccttttcaatgactggatggagagcagcaacaaacccaatcacttttccatttaaatgaacatctgctgtacggcctgggtgaagaccctcacgttctgcttgaacatatgtgatttggtctgatacaccaagcttttcgaacagaccttcagcaattcctttcgctacataaaaatcgacggcttttttctcgccctgccaaagatttttgtgccataagcctgtcagcgcaccagcgacatgctctttttccactggtttttctccttcagcttctgctaagaacacagaacccgtttcataaaaaccaaaggaatcagcttgtcttgccaagttatatgcaacagaatccagtaagtttggcagtagactttgtctgagcacacttcgttcttcactcattggcagggaaagtctcgttttataagctggattcagtgcaaaagctgtagacttatgctgatttgtcaatgaatacgtgatcgcttgagaaagacctgcgccttctaagaaacgtctgaccttcctgcgcttcacttggtacggcgtgagaccgccaactgtaccagctgtcgcaggcagtgtagacggaatattatcatagccgtataatctggcaacttcttcaatgaggtcttcttcaatcgtgatatccattctacgagaaggaaccgttacgacaagaacgtcatttgattcgcccactgtaaaaccaagtttgttgaaaatttgcatcatatctttttttgaaatgctcatgccaagcaccttattcacacgctcagttgatacgtggatgacattcatacttgcttcaaggtggttttcctccacagtcccgcttagcacttcaccacctgcatagagactgatcaattgcgctgctctttcggctgcaggttttgtacgctgcgggtcaagtcctttttcaaatcgtgtgcttgattcactgcgaagccctaagtctctagatgcttgacggaccgtttgaccgttgaaatatgccgcttctaaaagaatcgttgtcgtctcatcacgcacctcagattcaagaccgcccatgacgcctgctacagcgtgcgctttcgtcccattagtgatcactagatgctttgatgacaatgtacgttcttgttcatccagtgtttgaatgacttcgctatcagacgctttacgtacgaccacctgctttgaaccaaagcggtcataatcaaatgcatgaagcggctgaccgtattcaagcagtacaaagtttgtaatatcgacgacgttgttaattggtcgaatgcctgcattcatcaatcttgtttgaatccaaagcggtgctgggccaacctttacatttttaatgatcttcgctgcataaagtggatttgcttcttgatcctcaattttcacagagatatagtctgctgctttttctgaagaggtgtcatgtgctgtatcaggaagtttgatgtctctccctaaaatggctgcaacctcataagccacaccgagcatattcagggcatccgcacggtttggtgttaaaccaagctcaagtaccgcatcgtctaattgaagtgcctgaagggcatcatctccgggtttgacgtcatttgggaaaacaaaaatgccttctgcatattcctttggtacgagtttgctttctacgcctaattcttgcagagaacaaatcatgccatgagactcttcgccacgcagctttgcttttttaattttaaagttccctggaaggactgcgccaaccgttgcgacggccacatattgtcctttatccacattcggagccccgcaaataatttgcactggagcgtcttcgccgatatcaacaagacatttgtttaatttatccgcatttgggtgctgttcactctcaatgacatgtccaacgacaacccctttaatgccttctcctttatattcaacggcttccacttcaattccgcttcttgtgatcttttctgctaattcatccggctgaatgccttctaaatcgacatagtcttctaaccatttatatgaaacaaacatgttgatttcctcctcttagtcctgcttgaattgctttgtgaatctaatatcatttgtgtagaaatggcgaatatcatcaatgccgtattttagcatcgcaatacgttcaacacccattccaaaagcaaagccttggtaagtttctggatcaaatccgctcattttcaggacatttggatgaaccatccctgctcctaaaatctcaatccatcctgttcctttacatacagaacagccctttccgccgcatttaaagcaagacacatccacttcgacagatggttctgtgaatgggaaaaagcttggacggagtctaatttcacgatcttcaccaaacatttttcttgcgactgtctcaagcgttccttttagatcactcatgctaatattgtgatcgacaacaaggccttcaatctgcatgaattgatgtgaatgagtcgcgtcatcactgtctcgtctatatactttcccagggcagatgatcttcacaggaccttgtcctttatatttttcgagtgtacgtgcttgaactggtgacgtttgtgttctcatcagtgtatcctcggtaatatagaagctgtcctgcatatcacgtgctggatgctcctttggaagattcagcgcttcaaagttataataatccgtttctacctcaggaccttcctcaacggtatagcccataccaataaataaatcttcaatatcttcgacaacaatcgttaatggatgtcttgcccccattttgattggacttgctggcaatgtgacatcgatcgtttgagatgcaagttttttcttcacttcttctttttccagctgctcatttttttcagcaatggcatttgcaatctgctctcttacttcgtttgcgagtgcgcccattttcggtctttcttctgcggagagcttgcccattccacgaagcacctctgtgatcgggccttttttccctaaatattgaacacgaatgtcattaacttctttgagcgagctagctgcttcaaccttcgctatcgcctctgtttcaagctgttttaacgtttcttgcatgagtgtaatcctccttttgatatacaaaaccgcctggataaacggctgtttgatcgtttgaagacaataaaaaaacccgtccctctaaaaaagaagggacgagttgtggtcgcggtaccacccttgttgagcacaaatgcatgtgcgaataagcttcattgacataacggaatcaaacgaatccggttcacctttacgcaaagcttgcggtcccggtgacaactccagaggtgaattcctgtttcagcattccttaaatgcactttcagtctacgatgcattctccctataaggacgctccttgaaacaatcttcctctatcatggtttttaaaatattagtttcattatagtgaaaataagcgcatgttgcaacactatccacgcaaatgatagacgagaacagctgctgcaacagccacatttaatgattctgcctgaccatacatcggcacatataaattctggtctgtcatttgcagaatctcttggtcaatccctgctccttcattgccaacaattaatgcaaaaggaccttctgccgttacgcttctatacgctttcgcatttttcaaggcgcttccgtatacaggtatgccttgctccttacatgcttgtattgcctgctgaagggtttgctttaaaattggcaggtggaaatgcgatccttgtgctgaacggagcgtttttccgttaaacgcatcgactgttccatcacctaagattacagcatcaagaccagcggcatctgctgtccgaatgagtgtgcctagatttcctgggtcctgcactgcatctaacagaagaagtcgttcatacttcttttcttcaaatacaggaactgtacaaaccgccgcgatgtgctgaggcgtttccgtttcggtcatggcagaaaaggcttcttcgctcagttcataaagttcaatgtcaggatcgatatgagaaggaagcttatcaggcgatgtgaccattaattctttcacaactccgctcttcaatgcttcttcgactaagtgtattccctcaacgagaaacagccccgttttcgtacgttcttttttcgtatggagctttttccactgtttgatgtttgtgtttttagctgattctatatatttcaagcgattttaactcctttaaatatcatgaatttattatatctcatgcacactacataataaacctgtctttgagacagaatagggctattaccatcaaaaaaggagtgtgggcaatggattttaatttaagaggcgcagtcattcaaaatatcactggccataatcaagagcagcttgaacatacgattttagatgccattcaaagcggcgaggaaaaaatgctgccaggccttggcgtgttgttcgaagtgctatggcaagaagcatcagaaaacgagaagaacgagatcctcgagacactagagcaaggcttaaagcctcatcagaagcaataaaagaagccggtttgcttatcacagcaaaccggctttttcatttagccagtgatcggtgtttccatccgaagtgctggatcacgccaaatttcgacccattttttaattgcaaacacaatgatcacaaatcctaagatcagcatgataattgacagcaccgcattcagcacgctgtaacctgatgcctcaggattaaggtatacatttgctaccatccaatagcccgcataattcactgtcacatataagtaggcaagtggaattaaacaagtcagcatatatcgccttttatctgcaatttttaatacaacggttgccccgatgattaatccgactgatgccattaactgattcgaaaccccaaacagcgcccaaatggacccgatgtctccagagtaaagcaagtatccccacataaaacacgcaagcgcacttgcaaataccgacccaggtacccagtcatttcgtttaagcggtttatatgcttcgccaaagaaatcttgaatcaaataacgcgccacacgcgttccagcatcaatagcggttaaaataaagacagcttcaaacataatgacgaattggaaaaaataagacgccaaatgactaaagaacggaattcccgtaaagatatacgccatccctacagctaatgtcacagctccacccgttcttccttctaaatcaaggccaatttccttactcagctgcggaagattctcaacactcatcccgagcgttcggaacacttctggcgtactgttaatcgcaaaataatctcctggatgaagagccgtagcggcaattaacgccataatgccaactaggcattctactagcattgcgccaaacgcgacaggcttcatatcgctccagcggtcaagcatcttaggcgttgtccctgacccaacaaatgcgtggaaaccagaaatggccccgcaagcaatggtaatagaaataaaaggccagacaggaccagctaaaaccgggcctcctccattcacaaactccgtaaaggctgggaattgaatcgttggattgacgacaaagattccggcaatcagtgcgataaaaacacctattttcataaagctgcttaaatagtccctcggtgcgagcagcagccaaaccggcaatgccgcagcaaaaaaagcatagatcggcagggcaagagcaagcgtttttgtatcaagtgttaaaagatcaccaagtgccgttccttgaatattcggcccaaggaatacaccaaccatcagcaaaataaatcccgcagttgtggccagttttaaattgcctgtctttttataataaagaccaacccccatcgcaattggaatcgtgattccgactgcaaatgtcccccaagggttacgttctaatgcatgaagcacaaccatagacagtcctgccattgtgatcgtaatgataaacagcatcgcaagccctgtacaaaatcctgctacagatcctagctcttcctttgctacctctgataatgatttccccttttttcgcatcgacgcaaataagacgacaagatcatgtacagctccgccaatcactgcgccaattaacagccaaaggagacccggtaaatacccaaattgtgcggctaaaatcgggcccactaacggaccggcagctgcaatcgcagcaaagtgatgcccaaatgtgacccatttattggttggcacataatctttcccgtcctctaatgtgtgagccggtgtaggatgatcgtctgtcacctttaataccttgaccatcataaatgtgccataaagacgataggcaatcgctaaaatacacatagatcctatgacaattgtaaccgcattcatttaaccatccccttcgcacaaacaatttgttacaaatataacataaattgattgatttttctttcttttaaaaccaagttgactaataagaataatatgtttattcttaagatagcttcacctacttccataaactctcttttgacagggcgttctttaggctctgtcctttttattgctttcatcttacaaaaataaaggccagatcacatgtgccttattcactagaatattttttcttcttctgttaaaaacagttcttttgacgtaatcaaaaaacaacgttcatttcctgggaaattcaatggaataaaaaagcctttcccctatactgaggaaaggcttacctattaagaaccgtacgtaatctgctcaaccgttttttgatcaagtcttttgatcacttctgttaaaagcttcactgcattttcataatcatcccggtgaatcatcgctgcatgggtatgaatatatctgcttggtatcccgatagatagtgatggcacgccatgacctgttaaatggataccgccagcatctgtcccaccgccaggcattgagtcatattggtaaggaatgttcaattcatccgctgtttggacaacaaaatcccgaagccctttatgggataccatcgaagcatcaaatacaacaatcgttggtcctttgccaagtttgcttgttgcttctttttcagtgatgcctggcgtgtctcctgctacaccaacatcaatggcaaatccaatatcaggctggatcgtagccgctgctgttttggcaccacgcaggccaacctcctcttgtacagttgcaacactgtaagcaatattctcatgctgagcattgtgtaagttcttcatgacatcaatcgctactgcacagccgatacggttgtcccatgcctttgcaaggagcattttttcatcattcatcactgtaaattcaaaataaggaacgatttgatctccaggcagaacgccccactccattacctgttctttgcttgatgcaccaatatcaataaacatatctgtaatctcaatcgatttttttcgagcttcaggtgacaagacgtgcggcggctttgagccaatcacacctgtaatgtctccctttttcgtcacaatggtgacacgctgcgcgagcatgacctgtgaccaccagccgccgactgtttggaagcgaatgtagcctttgtcatcaatttttgtcaccatgaatcctacttcatctaagtgaccagcgagcataattttaggtccgtttgcgtttccttccttcttagcgattaagctgccaaggcggtcactagagacttcatctgcatatgattctatgtatgtctgcatgacttttttgacatcacgttcatttcctggaatcccttttgcatccgttaggtctttcagcatagttaatgtttgatctagctttgtcattccatatatcctcctttatcttcatggtgcattcttattatacaaaacctctttcgttcaatacgatctttttatgaatattttttcgtttaacgaaatatttttttaaaaaaagttgaaaccttttgggcttttcattcgtagtacatcagataacggtatattggaggtgcatcctgtcatgtttgtaatcctcattagacttgctcttgttgcactgcttgtctacatcttctacatggcggtaaaattcttctcaaatccgagaagaaagctgaaacaagcacaattaaaagaaggcttttattttatggacgaacagcaaaatgcgcgcaaaaattttaatttcgtctataaaggagtcttgtttgaaggggagaagcatgttccttctaaggatcatcctctgtttgtccactccatttacgtttggacggagtcacccgagaagctaagtgaatttacattagaagactttgaaaaattggaggaaaacattatcgaacgttatcctcaaacaaaaattgattgggatcagcccattaaaaaaatcaaacaaaaaaaaggagcagacacgccgtcttgatggcgtctgctcctttttcagatgaactggatatatcctaatatgagcaactgcacgatgattaacactggcatgcccatttgaaaggcaggatgctttgttttatgacggaaatactgcatccctagatacgatccagcagccccaaaaagcacggcagcactccataagtgcgcctctgaaattctccatttatgcgcttttgctctgcgcttgtcctctcccatgagaaagaaaccatagccatttaccaagatcagcagcacaatcaacgcgatattcattcatttcacctcacatgatgagcaaaaaagatcacccctcgacggaatgatcttttatatgacttacttgtctagttgtgcttttgcagcatcagcaagctgattgaatgcacttaggtcattcacagcaaggtcagcaagcattttgcggtttacttcgataccagaaagctttaggccatgcattaaacggctgtaagagagaccgttcatacgagctgcagcattgatacgagtgatccatagtttacggaagtcacgttttttctgacgacggtcacggaaagcgtagtttccagatttcatcacctgttggtttgctactttgtataatctatgttttgaaccgaaataaccttttgctaatttaagaacctttttacgacgctgacgcgacacagttccgccttttactcttggcattgtaattccctcctatgattcctattccagattacttgatgtttgcaagttgttgtttgatacgtttgaaatctccagcacttacgattgcgctcttacgcaatttacgtttttgctttgtagatttgttagcgaacaagtgacttgtgtacgcatgagaacgtttaagtttaccagaacctgtttttttgaaacgtttagcagatccgcggtgagttttcatttttggcattggatgtttcctccctctgttactttacttttcgacttttggtgcaagcatgaggaacatgctgcgtccgtccatcttaggttttgtttctactgttgctacttcagcgcaagcttcagagaaacggtctaacacgcgctgtccgatttctttatgcgtaatcgcacggcctttaaagcggatagaagcttttactttatcgcccttttcaaggaatttgattgcattacggagcttcgtgttaaaatcatgttcatcgattgtcgggctcaaccgaacttcttttaagctaatgattttttgattcttacgtgcctctttttccttcttctgctgttcgaatcggaacttaccgtagtccatgattcggcaaacaggtggttttgcatttgcagcaactaacacaaggtcaagattggctttcgtagcaatttccagagcttcctggcgggttttaatccccagctgatcgccattttgtccgatcaaacgaacttcacgcgcacgaataccttcattaactaattgatctttgctaatagtgagccacctccatgagattttgaattgagttcacaattcattttgaccatttcgttgtatgttttacaggcaaacaaaaagtgtgggcatataaaacacccacactgcgaacatttgcatgaaaaaataaatgtacggtcaacctgtcaactacaaacacgtgtcaatcaggtgagaagcgggtgcttctgcttgtgatatctattcaattcgttaattattctacacaattttcatttgtccgtcaagtaaccgaactcttgaaacaactttttcattttagcatgattaaacgaattgggcaaggctttttcaaaacaatgacaccatcaaagaatgaattgcataaagattgggatgacaatgacggtcacaactcctacgaccacaacggcgatacttgccatggctgcttccacttcacccatctcaatcccaacagagacgccaagtgcatgtcctgatgtaccgagtgcaagcccttttgccactggatttttaattcgaaaccattttaagaagaaagcacctagtgcatacacgatgactgcattaaatatgaccgcaaaggctgtgatatctgcaattccgccaatatcctttgcaatcggaagagcaattgctgtcgtcgctgcctgtgggagcatacttttcattacagccgcatcaagatgaattccttttgctacgacatacacaattgtaatggaacaaagtgatcctacaaaaatagcggataaaatctgccaccaatattttttaagtaatgcacgctgtttataaagcggaatagcgaaagcaatggtcgcaggctctaagaaaaacttgataatcttgccgccctcattataatctgcataggaaaaaccgccaatttttaaaaataaaatgcctaacaccatggccacaaaaagtggtgtgaataagaagaagccttttgattttttaaataagaatgtaccgattccaaaggcgactaatgagacgactataccaaaataaggactcatcgtacttgtacccatcttgctttcctcctttaatgcgtacttgaagctggtttattagaatgagaaggagtcgatttgctctcctttgtctctttatgtttctgtggtttttctgataattgcatgagaagctgcgagaatagccctgtcgctgctagtaacataatcgttgcaatgataatgacaccgacgacttgcacacctacttcttgcatgacacctagtgattgaataaccgagataccagagggaacaaatagaaagctaatgagccctgtcaatgatgtacctaattgctccacctgctccagtttgacgattttcgttgtcagcaaaacaaataatagaaccagaccaatcacagatgcaggcatcggaattggtaaatacattgaaatgagattagaaacgaacattacggttgcaaagataaatgcttgagatagaaatccatatactttagtggcactcatgccccttcacctctttcttcgactgccctcagtatacggcatgaaataaatgaatgaagcgtttacaaccaaactcgccggattcaatgaatgaaatgcagaaaacgagtattgaaatacaaacaaaaaaagccgtcctactctagcaggagcgacttctttagttctttggcgtaagtgcggctgacaggaatgatcgacccgtctgtcatatgcagattatacgtcgaattaaaccacggctgtacttctttcatatgagaggtgttcacgatatagcttcgatgaaccctcataaagtaagcctcaggcagtttcttttcaatgaccacaagcggttctgtgacctcatacatgtgatcctttgttttcacgacctttttcccctcactgagccctacatacatgatctcttcaacttgcaggatgacaattgagtcatcgactgagatggctaatttttgctgatggggtattttctcatctgacagctggtgctcttgcgtctcaacagatttccactttttaaacttttggatcgtttgcaaaagccgctcttcatcaaatggtttcgttaagtaatcaagcgcacttacctcaaacgccttcagcgcgtattgatcaaaggctgtcgcaaatacaatcgctggcggatcagacatccggttgagccttttggcaatatcaaatccattctcaccagataaatcaatgtctaaaaagagcaggtccggcttatgatccaccatccggtcaaaagctgattctatattttctgcttcctctatttgaacatcctctttcgttctgcgtaataagtattttaattcgtctcttgctaacacttcatcatctacgattaatacgtttatcaacgaaaatcatccttttttacatagtccattggaatgcgaaatgagatgtcagtgccttggccgctatgaatggataaagcggcttgtctgccaaaaatccctcttaaccgctgatctaaattaaaaagagccgtacctgttccttctttggattcaacaggcgcttttaataactgagccatcttgtcattctcgattccctgtccattatcagtcacttttatataaacatgcccatctttcatcaaagcagaaacgacgacttcacaactcgtttgatgtttaggaaaagcgtgtctcactgcgttttcaacaagcacctgaagcacaaatggaggaatcatcacctgctccagctccttttcaatttgaaaggccacatggtatttatttggaaacctcgcttgttcaagcgacaaatatgcctctacatgctgaatttctttatgcagcggaatcagcagctggcgggcgccttgcaaattagaccggaaataaatactcagctgcagcagcagcttccttgccatctctacattcgttctgcacaaaacagagatggtattaatggcgttaaataaaaagtgcggattcacttgcgcttgaagcgctttgatctctgcatctttcagcaggcggctttgggtttctgcctctccaagttcaagctgtgtggagaacagcatcgccaagccttctgcaagctcctcttccaccctgcttaatccgaccggagaattgaaatacatttttaatgttccgatcgtttgaccattggaggtgaggggcagcacaatcgctgcttgaagcgggcaatgagtgactgaacaattgatttcgtctttcgaatgcgccttcataattttgccgctcatcaatacttgtttcgacagccctgtaattaggcttttcgatggaatatgatgatccgtcccatcaccgacatgcgctaaaatcttttctgtatcggttaaggagaccgcatctgtttctgttaatcgatgaatgatctccgccacacttttacatgactgttcatttaacccttggcggaaaaaaggcagcgtttgatcggcgatcgaaaatacgcggtgtgtctgcatcgcctttgcctgctcttcttgccgaatgactgactgtaaaatcgataaaaagataaagctgccaattccattcacaaaaatcatcggcagggcaataatactcacaagcccccaagcatcagcaaatggctttgcaaatagaaggataatgatcatctgcaaggattccattgccacaccaaaaagtgcggcttggcgaggtgtcaccattcgattcttccgtttaaacctgctgccgacatagcctgcaatcacaccggctaaaatcgaagaaatcgcacagctgagtgccgtgctccctcctaatgaatagcgatgaagcccagctagaagccctgcaccaatgccaacaaacggccctcctatcaatccgcccatttcgatccccatgattctcgtattggcgatcgagcttgatgagccaagatgataggaaaactcatgattcatgaccatctgctgctggatttcaattcctgtgtaattgctgataatactaaaagaagcaaaaataaagacaaggactgccttttttcgaaacccttcattatgaagcaatagattgcgaaagcccttcacatgggcaagcacaaaccctaaaataacgatgatccccacacgctcgatcatcataataattaaatgaagcaaaccggccacctcaattgatgtatgttatatctactgtctttctattctatcatgtgcggtcaatgatccaagatctctcaaatcttttctttattgccctcatcttctattgtaaaatgaacatgagccgtcacttgcaattgaaggtaacacatacataacaagggagaagatcatgaaagccgtatttttcgatttagatgatactttgctttgggatgaaaaaagcattcacacaacttttcaggaaacatgccgcgaagcggaaaagaaatatggactgaatccagcaacatttgaacagattgtacgtgaagaagcaagaaagctgtactcttcctatgaaacatatgattatactgtcatgatcggaattaatcctttcgaaggactgtggtcaaattttagtgaaccgattagcgaaggctttcaaaagctgaatgcccttgcaccagagtatcgcaagaacgcttggacaaatggcttaaaagaagcaggaattgacgatgaggcatttggacaatatttggctgatttctttgcagcagagcggagaaaacgtccatttgtctatgaagaaacgtatcctgttttagaccgcctgaaaggcagctatgaattgctccttttaacaaacggagatcctagtcttcaaaaggaaaaactggcaggtgttcctgagcttgcaccttattttaatgaaattgtgatttcaggagattacgggaaaggcaaacctgaccctggcatctttgagcactgccttcagctgttaaatctaacaaaagacgatgtgatcatggttggagacaatccaaaaacagatattcttggggcatctcgcgctgggattcaaaccgtttggatcaatcgacatggcaagaaaaatgaaacagatgtaacgccagattatgaaatcaaagacttacatgaattgtttgatatattaaaatagaacacaaaaaccacccttctcctgacgagattgggtgttttttgtgttctcaaactacacaattgccgctagactttgtgcttgccggtctaagccgcgggctgcttctcctacattcacaaattcctcgcttgcctgcttcacaagatcatggtttgtaaacacggttgtcttggcccggctcgttccgctgctgaccttctctacttctgcatgaatcgcctttacatattgatctactttgacgatcgcttcttttgaatcagttgcaagctttcgaatttctgccgccaccacactaaagccatttccataggaacccgcatgggcagcttctatcgccgcatttaatgcaagcagctgagtttgtgaggaaatgctgttaatcgttgcagcaatggagctgatggactctacctgctctgttaatccttctagtaagctcatattttgatctgtttcgtttgctatatgatcaaaggagactttgactctttgactatgctggatgcccacttctgcacgctccattaatttcgcagacatctcctttaagtcgtctacgacctgtttcatcgtgttttctctctctgttatgtctgttgcgactttcacaacacccactacgtgcccctcttcattgcggacaggtgtatatgtcgcttcaagccataagctatcaccattcttcgtcgtccgctgcaccttttcctgaaagatttgaccctctttcaaacgcttccagaacatgtgatagcttgcgtgttctgcaatatgcggaggacagaactgtctatgttttaaaccgatcaactcttgcttcgaatatcccatggcttttgcaaaaatatcattgacccatagaacttcacctgtcacatcaaattcaatcatcgccagtgagtgttccaacgcacgaagaactgctgaccgctccaatagttgtgatgataaagtgtttgttgtttgcatcatcgctttcattcctccaatttgtctcgaaccaacagtacatatttacccatactttcgtactatccaaacgtatcattcaagaaactggatcaccagtggaaaatttttccccataagaaaaagccagtgatctcaagagaaaggtcactgactgcttcattggaagtattattttttcgcttctgctactgcatgtttcacaaaggcttcaagatccattgtttctgaatcttgctctccgtattttcttacattgacagcgccattttctgcttcttgatctccgacgactagcatgtacgggatcttttgcatttgcgcttctctaattttgtatccaatcttttcatcacggctgtcaagctctacacgaaggccttcaagctgcaaacgttcttgtacttttttcgcatagtctaaatggacagacggtgaaaccgggatgacttggaattgtacaggtgccagccatgttggaagggctcctttgtattcttcaattaagaaggcaacaaagcgctccattgtagagacaacacctctatgaatcacgaccggacgatgatgcttgccatcttctccgatataggtgagatcgaaacgctctggtagtaagaagtcaagctgtacagtagacaatgtctcttcttttccaagagctgtcttgacctgtacatcaagcttcggaccataaaatgccgcttctccttctgcttcataataatcatgaccaagctcgtccattgcatcctttagcatcgattgcgctttattccacatcgcatcatcgtcgaaatacttctcagtatcttctggatcacggtaagataagcggaatgtgtagtcattcaagccaaagtcttgatacacttcttcaattaagcgaactgtacgaatgaactcttctttgatttgatctggacgaacaaagatatgtgcatcgtttaatgtcatcccgcgaacacgctgaaggccggataaagcacctgacatttcatagcggtgcattgtaccaagctctgcaatacgaattggcaattcacgatagctatgcggctcgtttttgtaaatcatcatatggtgcggacagttcataggacgaagaacaagatcttcgttatccatttccatcactgggaacatgtcttcttgataatgcgcccagtgccctgaagttttatacaattcgacattcgcaagaactggtgtatacacatgctcataaccaagacgtacttctttatcgacaatgtaacgctcaataacacggcggatcgtagcgccttttggcagccaaagcggtagaccttgacctaccttttgagagttcgcaaacagtttcagctcttttcctagtttacggtgatcgcgttctttcgcttcttcaagcaggcgtaagtgctcatttaaatcttctttgctgaagaaagctgtaccgtaaatacgctgaagcatttgattgttgctgtcacctctccagtatgcacctgcaaggcttaacagcttaaactctttgattttccctgttgatggcaagtgaatgccgcggcagaggtcaaagaattcaccctgctcataaatcgtcacggcttcaccttctggaatcgcctctaacagctcaagcttcaattgatcaccaatcgcttcaaagcgttttttcgcttcttctcttgatacttcaattcgctcgattggcaaattgctgttaatgatttttttcatttctttttcaatcttaggtaagtcttcaggtgtgatggcaacatcgatgtcgacatcatagtagaaaccattttcgatcacaggacctacgccaaactggacatgatgctcttttccataaagacgtttgatcgcctgcgctagcaaatgtgctgtgctgtggcgcataatgtcgagtgcttcatcacttttatctgtgatgatctcgattgttccactttctaatagcggcgtacgcagatctatttctttgccgttcaatttaccggcaagcgcttttttctttaggcccgggctaattgatgccgcgatgtcttctgttgtagctgttttgtcaaactccttgactgctccatctggaaatgtaagttgaatttgttctgacatctctggtcactcctttttttggcaatataaaaaccccgccccctggaaagggacgaggttgaataaacggaatcgtggttccaccctttttcccgtatttgcagcttacgttttcataagcaaacacggcttgtggttcgataacgggaattcccgtcagccattactaaaaagttcacagctgatgttcaaaggtggtaaagcaaatggtcctctgctaggaagctttcagccgcggcttccctctctttaagcgggtgttcatttgttcatgtccttatcaatacggtctctgtatgaagttacaccgtattataaaacgttttttcgtgaaaatcaagaaagcttttcacttttctgttccaaatggtcatgtacaaattgaacattctgttcttgaaatgaatgagccgggaatacctcgaccctttcttgaaaaatattttgaatggtctgcaccatcgagtgacccgtatcatttgtaaataggtcaatcttttgcggcgctatggatacgagtggtgcaatcagctgcgaatcaatatacattggatgctctcttacaaactgtctgtctatgtattgtttttgatcacgctcagaagcgtaccgaaattcccaaatcatcaggcggtcctgatgcacaacatgtactttttcgagcttaggttctcttgccatcacatagtctcgaagggattgaatgaagttttgatattcttgttccattttgtattcttcaatggagacttcaacatagttcttcagactcctgtcatactctgacagtctaaatgtcataaatgaaccaattgaaaaaataccttgctgtaaagaaatggtctcaagctcctttgttaacagggcttctcttgacggttcttgatgaatgccgggaatatcatctaaatccccgttcataatactgtgggcgattgaaagaatttggtgctgctcttcaggatctttaaataaataggtgttttcaaggatgctgcgcatgcgctcattttctttgcattccaaaaaaaagtgaaccagtaatggccgcacaatgggctcaagtccttcttctgattccttcgcctctatgagaagccggtctttcccttgttgaattgacatgtgatgccgactgtccaagtgttcagcaagatgtaaaaaagcggcggtatcatattcatcttcaaagattatttcaagcatgtttgtcccccctaacgacatctgttacatatatatgggggaaacataaaaaatagacgcctaaaataaatcaggcatctttctttttaaaatgagcggaacggagataaagatcagataaatcaaacaaacgatcactaaggcggcataattgccgctgacaaagcttgagccaaggacatttaatgcaactgtacccggtattaagcctaaaaaagtagctgccgtgaatgcacgataattcgcacgtgaaactgctgccgcatagctgacaaagtcaaaatggatcggggcaatacgcaataacaaaatataaagaaacccatgctcctgaatgcgggatgtcaccgctctcagcttccggctgcttgattctctgccttccttttttgcacgaaaggttgtggcaagcaggaaggagcctgttgctccggcggtagcaccaacgagggcataaatcgtcccaagaacactgccgaatgctaaacctgctgccagcgaaaagaccgtaagtgggacgagaacaaacgggcgaaaaagagataagaacagaaaaacaaagggagccagcagcccaaattgaagcacccaattcttcacatctttcggcgccagctgaaggtgctgtttgttcagccaccaaagtaaagcagcgagacctgcaatcacgagaaaaagcagccattttcttttgttcatttcatttgcccctccttcaggtgatagacgcttttataaatgacggcggttttctccttcgagcaagactgcctctgctaaataaagaatccgttccattaaacgagcggctttgacctcttctttttccccgcgctgtgagtacgtaaagtgatgtttcagttcacttggtgagaaattagaagagaagaaagtcggcagctgctctgccatacggtattgtaagatcgttccgagcagttcatctcgaacccagcttgtcatcgactctgccccaatatcatcaagcattaaaataggggtggatttgaccatgttcagctttgcttccagtgtatgatcggctaacgaattttttaactctctcacaaattcaggcacgtacactaggagagatgggtattccttctccgctagctgctgcgcaatggctgccagaatatacgtttttcctactccaaactttccgtgtaaatataagcccttccctttgcccgtctcatcatagctttgcaggaattgacctactttttgaatgacttcctgtcttcccacaacgttcagatcagtgaacgtcgcttgaagaacattttgcggaatgtacatgcttttcataagctcttgctgttttttctgtctatcgagccgcagcttgactgggcagggggaatattcaatatcaatactctgacctttgatcacaagcttcgggtgatacccgtctaaaatcgcattgacgttctcttcatctaagcaatatgaacaacccttcgactgctgcacatattcaaaaagccggttcaaactacgattgatcatgtcttcgtgtatttcttcttgatgctcctgtaaaaaggcccttacatcttcatcagataacacactctctttaatctgattgtatctcacacgaaaatctactcgtccttttaactgttcaaatgaacgaccgatcggtttcatccccatctcacctcaccttaatgtgcattgtactttttcatatttttaaactgatctaacagtttttctttttctcgttcgaggtcttctgtcgacagactgtctgtttgttcttttgccggctgttctttcgtttcagtttctttcatccagtcaggaagcttctcttctcggacaactttccctgatccatatgtgctgcgctgctttttctgctgcgcccactctgtcatttgcttgttctcttctttggcaattttcatggctgccgctacggttttaattttctttctcacccaatgagcggcgattttttgcatatatgttttcgacagcttcatatctgttttcagtaatgtatagtagatcaaaacgttcatgacacctggctctagctgctgctcgagcataatatcttcgacaattcttaagtcggcatacgttggctcaatgccgtctgccatatcttttagcagctcccgaggcgaaatatgatcgagcttttcaatcaatttcgcatctggcgtatctgctagcgcttttgaagcatcttgacgcaggtgtctaggctgtttttgatcaatgagttttggctgctcgcctctgtattcgatttggtaccagtctcttgcggcttttctcagctcttctgttgagatcatttgatccgaaccgcaggcgcctgctacaatattttgcatttgaagcggagtgatgccgtatacaacggctaacttcttaatggtttctttcacctgctttgtcaaagcctttcttggaatcatcatatcagacatgcccgctaacaatagatcgaaatcaaaggattcgtctgaaagcggagccggctgactcgatccaacggtcacatattcatagccctgatcaagtgatgacgcccgattgatttcttctgtcatcctgcgttcacctggctgcaatacgtgaaagacttcttcaaacgaccgcgagatgttctttgcctctgcaggaacacctggataagaaaaataatcacgaagctgcatatattttgctttctctacacgatggtacagcaggacattcagcataccatcctggaaaaactcatctggtcttagcggcggtacaagctcatatgtaaacagtctgccttctttcgtttcctgttcatatgtgcgaagtaaaccgatcgcttcaagctttaaacgttcctcaaaaatatcatttaaattcgtttgcagcatgaccatgagctgccgatgaggtgcgggtttcccccacatacgattttgttccagctctccccacagcgtcatgtataagctgaaagcggacatgccaataagcggctgatataaaagagtgatgagctgtctatcgatgtcaccgagcaatgaagcgcttttgacgacatatggatcgacggctagcacttccttccaatgctctgtcatatgctgatcctccccatggattgcaattgtttctattgtacaccctttttgcgttttacgctttacgcaggaaaaagagcgtgaagaatcttcagctcttttttagcgttctttctttaataaatcttttaattcatcaataaagacgttgatatctttaaactgccggtaaactgaggcaaacctgacgtaagacacttcatcaatttttgccagctcgtccatcaccatttcacctacaagctcacttttcacttctgacatgccttgattacgcagttctttttcgatgttaaagcagacatcctccagctgctttaaagcaacaggacgcttttcacacgctttaatgagtcctctcagcatcttttcgcggctgaattcttctcgaatcccttcttttttcaccacaatcagcggtaattcttctaatttctcaaacgtcgtaaagcgatactggcagctttcgcactctcttctacgacggatggatttcccttcatctactggtcttgaatcaagcacccttgtgccaaggtgctgacatgtgggacatttcatttcatcagctccgatctattcttggaagttgtttgtctagttcatcataaagggacaaaacggccttctgactataaccaaaatctgttggcaggaccgtttctgttgtcacattaaaatcgacagctgtttcaaaaggacgaattgaaatgacagtcgctacgagaaaggcttttttcggcattctgatgtttgcgctgatttcacctcgttctgctgaaacagatgtcacttgataggaatcgtttcgggaaagcatggcttccaccgcttgaaaaacttgtgcattcgtcattttgtagtaatggcttttcagttctgacactggatgctcgtcagatgtttctgtatggtttgacatgaaccgtttgaacttttgtcctaaagtcatatacgtatcccctttgccataatgcctcttctttattttataaaaaaaacctttgttttcctagaacaaaagtatagacaagttggggaatgttggattttgtatatcaaagaaatataaaaaggagcataacacaaaggcatttcaatgcttttggccagctcccattgcaatcttttttatgtttacagtgctttggcttgtgcctgtttcacttgtacaggtcccatgcctcgaggaatttcgatgttttctcttgtttcggcacctaattcatctccgatatgatctgctgcgatattcggatctaggtcgccgcaagtataaacatctatgctcgcataaccatgttcaggaaagctgtgaattgtcagatgagattcagaaataatgacaactccacttactccttgaggtgcaaatttgtgaaaagcaacctctcttacttcagctcctgatttcaaagctgcatttacaaacgttttttcaataaaatccatgtcgttcagtttatcacagtcgcatccccatagctcggagataacgtgacgtccgattgtttccatcatggaccccccttaaacaagaatgaaagagtgaagttctaagcagccggaccggacatataccacgggggaaagttagtccaaagaggtcctaaccctttaagtatacccgaatgagtctgcgaacaagaagttcacgaaaaatagtatactttgtttagacccattttgcaagctgtgttttcaatgggattttctctcatttcttgaaaagggacgttcgtcttcttcatttcaaacagcagaaagctctttcatctgcgaaccgacaaacttcacaagatccaccactctgcatgaataaccccattcattgtcataccatgcaagaacttttacttttctatcctccatcaccatcgttgtcagtccatccacgacagctgaataagggttcgtgttaaagtctgtagaaacaagcggctcatccgtgtaatctaaaataccggatagagaagtttttgatgcatttgagaaggctgcatttacttcttctgctgtgacatcttttttcaagtcgacgacaagatcaaccatcgatacattggaaactggcacgcgcagtgcaagtccatgcaatttccctttcatgtgcggcagcactaaagaaagcgctttagcggcacccgtcgtagttggaatgatggactgggcacacgctctagcccggcgcaaatccttatgcgggttgtcgatatttttttgatcatttgtatacgcatgaaccgttgtcattaagccgttgtcgatgccgaattcatcatctaacaatttaacaactggtgctaaacagtttgttgtacaagatgcgtttgaaataatgacgtgcttttcaggatcaagatcatcttcattgacacccatcacaattgtaatgtcttcatttttacctggagctgtgagtacgacctttttcgctcctgcatctatatggcccatcgcttgttcttttgaattaaatttccctgttgcttctatgacgatatcaatcccaagctctccccatggaagctgctttgggtctctgtcattgagcaaaagcactcttttcccatttacaatcagtgcgtcatcttctgctgtcacatcgcattcgtaacgtccatgatttgtgtcatatttaattaaatgtgctagcgtttcggcaggatagcttgcgttcaccgctacaatttgaatttgatcatcaagcattgcttttctgaagaccatgcgtccaattctgccaaacccattgatcgctgcttttaccttcatgaacaggtcactcctctattatgtgttatactcaataaatttatttatgaaattagtatatcacattagaatgtaattgccagtatataaacgtatattttctaaaaagggctgttcttttcaaaggaaataagaataaagcataaaaaaagaagagtacgtgtatgtactcttacttatctgtatgttcccattcatttaatatgttctgcaattgctttctgataaaagcgagatcttgtgtgttttctatcacgcggtctgcttttttacatttctcttcaaggggctgctgagagtgaatccgatttagcgcttcttcctcactgaggtcgtttcgattcatgagtcgtgatagctgtaattctggtgttgtatacaccacaatgatccggtcgacaagactttccagctgactttcaaataaaagcgggatatcaaggacaacgaatgtttcttggctgttgatcccttcatctcgctgcctgagcatttcctttcgcacttctggatgaacgatcgcattcagctgctttcgtttctcttcattagaaaaaataatggctcccagctcctgccggttcagctctccatttggcaggaggacaccctcaccaaaggtttgaacgatatgatgaagggcggatgttcctttggagaccgcttcttttgcaatcacatctgcgtccacaacccgaatgccctgctcttttatcatctgcgagactgtgctttttccgctagcaatcccgcctgttaatccaatgacaagcgtcaattgatttcctccttttacagcttccaaaccccaattaatatgagcagaagccctggtaagcatgcgagtttattgatccagcgccaatttgccaagtaatgaccggcacgcagcccgatacacacaaaaagtgagctcatcactgccaccgtgatactcataacaattggagaaaagccaagaatcgctgcgccaatccctgcgccaaatgcatcaatggataaagcaattccaagaagtaccgcttccattccattaatcgtcccagatcggtcaatatctgcacttgtcggctttcttaaaatgtgaatgacaagcccaagcgattgtacttccacattgagcaatgtcttttcatgaagaagcaaatcacgctctttcgctggtttgtaaaattgatacaggacccaaaggccaatggcaattaaaatgcctccccccagtttatcggtcactgagacagggagaaatgtcgtcagcaggctgccaatcagcatagaaatgagcagcacaatccctgagcagcatgcaataatgacgatggctttaaatgggatcctcattttgcgaagcccatacgtaaatcctacagaaaagctgtcgatgctgactgcaatagctaaaaacaggagcgaaatcgaaatcatacctgaactcttcctttctgttcatgcaacgatgatcaagagtctctaggcgtccttagactcttcttcactatatgaagagcaggtgggctgtgtgtcagtctacaccttgctgaaaaatgaatgttttttatcgtatgcatagcaaaaaggaagcatgctcatggctaaactttattgaggacgtttttggcaggtcacacaaaagtgcgtgccgcgccctccgaccactgttttctcgatgatgcttccgcatgtttggcaaggctctccccgccggtcatatacaagaagctgcagctgaaatgttccaatatctccttgtgagttgatataagaacgaatcgtgcttcctcccgcatctaccgctacttgaagcgtatcgatgatctgtttgtgaagcactttgcaggattccaggctgagctgattcgctttcgtttctggatgaatacctgatttaaacaggacctcatctacgtaaatgttaccaagtcctacgacaatcttttgatcaagcagtgctgttttaaccacgcgggttgtttttttcaattgctcccataaatactcaggagtgaactgttcatcaaatggttcatatcccagctgagaaagcgggagttccttttcctcttcacccggctgaaataaatgcatcgtgccaaatttacgcacatcatggtaccgaagctcagtaccatctgtaaacgtaaagacgacgtgtacgtgtttatcataaggctcatgcgcttcatgtacacggtatttcccttccatccttaaatgggagaccatcacataatggtctaaatgaaagaggaggaacttccctcttctttcaatggtttgtatggtttctcctaccattcttcttgcgaactcttccggctccccaggacgtttgatgatgtttggccatttgatatcgaccgtttcaatcgtttttccttcgactaaccgcttgagagtgcgccggacggtttcaacttctggtaattccggcatgctcctcgctcctttttctctctattatttatttcgcatcgtaccaagatggacctgaagcaaaatcaacttttagcggcacatcaagctgaagtgcgttttccatgacttcaggaacaatcttttcaaggatggcgatttcttctttcggcgcttcgaagatcaattcatcgtgcacctgtaataaaagatttgcctgcaggttttcttctttgagccttcgcgccatatcaatcatcgcttttttaataatatcggctgcgctgccttggatcggtgtgttcatggctgttcgttctgcaaagcttttgatattaaaattacggctcgtgatatccgggatataccgtctgcgtttgagaagcgtcgtgacgtagcctttttgtttcgcttcctggacgatttcttccatataggttttcacgcctttaaagcttgttaaatagcgctcgataaatgcggctgcttcttttcttgtgatcccaaggttttgagaaagtccataatcgctgattccatatacaataccgaagtttacagccttggcttgtcttctcatagcggaagtcacttcttcttctgagacatggaacacgtccatcgctgttttcgtgtgaatgtccatgtcttgcgtaaacgcttcgatcaaattctcatcttgtgaaatatgagcgagcacacgcagctcgatttgtgaatagtctgctgcaaacatgagccagccttcttttgaaggaacgaatgcttgacgaattttccgtccttcttctaaacgaatcgggatgttttgaagatttgggtccgttgagcttaatcttcctgtttgcgtgagcgcttgattaaatcttgtatgcactttatgggtgtccttacgcgttactttcattaagccttccacataggtcgattgcagctttccaatttgcctgtaatgcagaatggaccgaatgatttcatgcttatcttcaagcttctcaagcacatctgcagacgtcgagtagcctgtttttgtcttcttgataatcggcagacctaatttttcaaataggatgacgccaagctgtttaggagaattgatgttaaacgtttctcctgctaagcggtgaatggtttcttcatattctttgagctttttcgttaattcttcacccattttctctaggcgttttatatctacctttactccaagagattccatttcacctaagatgagtgctagcggcagctctaaatcttcatatagttcatgctgatcatttttttctaatgcttctaatgttaaatcatgcaaggctgaaatcgccgctgcttttcgtccaagatgttctttcagttcatcttcaggtggaatcgcctgctttgctccttttccgtatactttttcatcagaaagagcgatattcagaccatattccttcgctacactcgcgacgtcttcgtatgatttctgcgggttgacgacataggaagcgagcagaacatcattatcaacaccttttagatcgacatcatgccatctcagggcgacaactgctctttttgaatcaaagacccattttttcttcgtttcatcctgtacccattctttaaatgcttctgattgaagcgcatcttctttcgtgataaaaaacgcaccattttcattatggatcgcaaaaccgatcaaatccgcttcgtgataattatctccaagctgttctaccacaagggctgcatgatctgtcagcatgtcgtccgttacagctgtcatttttttcacttctaatgcatctacttcgacctgttcatctgtttctggtgcttctcctagacgctctagcagcgtttgaaagcccagttctttataaagagagatcacttgatccatgtgagggccttcgtatgcgagatctttgcttgacacatcaataggtgcttctacaagaatcgtcgccagctctttactcatgactgcttgttctttatattcttcaagtttttcttttagctttttcccgctcacttcatcaatatgttcaagcaggttctcaactgtttcaaactgctttaacaatttaatcgctgttttttcgcctacacctgggacgcctgggatattatctgaggaatctcccatcagccctttcatatcaatgatttgatctggtcgcaggccatatttttcttcaatatgagcaggtgtgtaatattctacttctgtgatgccttttttcgttatagccactgtcgtatgatctgttgagagctgtgttaagtccttatctcctgagaagattttgacttcaaagccgtctttttctgcctcgacagccaatgtaccgataatatcatctgcttcatattgaggaagctcgtaccttttcacctgataggcatctaatagttcacggatgaacggcatttgttctgatagctctggcggagttttttgtcttccacctttatattctttaaatgtctcgtggcggaatgttgtttttcccgcatcaaatgcgacgagcatatgggtaggcttctcgtcctccagcatcttcattaagatcatcgcaaagccataaatagcatttgtatgtacgcctttatcatttgataatagcggcaaagcaaagaaggctcgatatgcgaggctgtttccatccactaacactaatttctttttgtctgtcatgttttaatcctccatcggctgagccatctcagccgtctctttcacacattgtatcttcattttatcaaagtttattttgaaaagaaaatagtcgagcctgcacaaaaaagggacgaaaacaacaagtgttttcgtccttccaaaattggctccttggatgaaggggttcctattcatcctatcaatgaatgtttaacaaaacatgaattcattgtaaagatcatgtaaattttaacgtgactttcctttttttctctaagtcgatttcaggctcactgtaaaagtcgttcctttgccttgtttgctgtggacagaaatcgttccttcatgcgcttccacaaggtgtttgacaatggcaagaccaagacctgtaccgcctgaattcctgcttctatctttatcaattcgataaaatctctcaaatattcttggaatctcgcttttcttcatgccgattcctgtatctgctacatcaaattcataggcacctttccgcggtcttgctgagatggtaacacttcctccctctggtgtataggtcagggcattattgacgagattgaggaagatttgctttaaccttagcgggtctgccataacatagaccggttctttcgggacacgcacttgtaattgaatacctttttctgctgccttttgttttaacagcacttcaatctcttgaatgatttctgtcgcattggcttcttgaatattcagcttgaagtgctgctgttcaattttagaaagatcaagtaagtcttgaatcagcgtttctagacggacactctcttttaaaatgatagaaaggaattctgtcagtgcttctttgtcatcaatcgcaccatcaagaagggtttcagaaaatcctttaatcgacgtaatcggtgtttttaattcgtgagacacattggcgacaaagtcttttcgcatctgctccagctgctttgtttctgtcacgtcatgaaacacaaggacaattcctttccattcatcgtctgtacttaaaattggtacaccatccacttggaagtagcggcgttcaatgtcaacggctagacgtaaaaacttccgcaccttcgtttctgtcatgaaaatttcgtcaattaattcgataatctcttcatgtgtaaacgcttcgtgatacagcttgtgcatgtaaatatgcttttggactttaaactgcttgcggaaggttcgattgactaggtggatataacccatcttatcaatcaaaataatccccgctccaatattttcaatgaccgtttgcagccggtctctctgcatttcaccggcacttgtcatttcttgaagacttcctgccaaacgcttcatggaagtattcagttcacttgtttcaatcatcaactcttcatagttattcgtatcatagttcccgcgttcaagctgtttggctacctttgtagcataatcaattggtttcacatatttcatcgacatgcggtacccaaagaaaacgatgatgataatcgccgagccaagacaaaaggctaatgcaagccagagctggccgtcaatttcatttaaaggctcgtatgacgcatggagaaataaataacccgctggttcgttttgtttcaggatcgggacagcataatgaaacagcgcatccttctcatcgtcaatgacgaccccttttgtttggaaacgttcattgttcagcgtgtttcgaatgatggccctttgttctgcttgacccgttgtatgtatgatattccccttcaggtccacaatcgacgcattcatatcaaaatgctgctttgcctgatggaggacctccttgttttgcttcgccttcagatcgtcaccattcatggaagacaggaggaagctcgattccttttccattcgttccgttaatttggtttcatagaaaacatggaacatgtggtccaagaaaagaccaagtgccacaaacacaataaaaaggagaaaaatgagtcccgaaaacagacgggttctaattttactcatttgactttggctcctccaatttgtagcctaagccgcgaatcgttttaatgtatgttggttttttcgtgttcttttcaattttgtcccgcaagtggctaatatggacatccacaatacgagtgtcacctgcaaagtcataattccaaacggcacttaacaataaatcacgcgtgaggacacgtcctttatgcttcgccaaataaagcagcagttcaaattcttttggcgtgagctctagacgttcttcctggaaatagacttcgtagtgttctggtaaaatgcgcagttcaccaattttgatttggtctgcaatgttctcttccttctcctcttgtgtgggggcaggctgagattgctgtgctcttctcaagatggcttttacccgagcacccacttctctaggactgaatggctttgtcatgtaatcatcggctccaagctcaagacctagcaccttatcaaattcatcgtcctttgctgtcagcattaaaatagggaacatcattttttgaattctcagttgtttgcacacttcaatgccgtccatcttcggaagcattaaatctaatacaatgagatcaggctgttcacttgctgctttttcaagcgcttcttccccgtctcttgctgtgacgacatcatagcccgctctttcaaggttatagcttagaagtgttacaatcgattcttcatcatccacaactaatatttttttattcatgttgtgcctccaattagtgatttcccctgcatccgttttttgtatcttatgtgaaaagcgagaagtcatgctttctctttcattttaacgaaagcttaacaagaggacaatttaaaatttcgacaagatttgttttgtaaacaaaaagaagactcctcatgagagaagccttcttttttattcatattaagacaatactttcatgacattcttaacagattcaacagaacggtcaagctgacttctttcttcttctgtcagctcaagctcgatgatcttctcaagaccgttgccacctacgattgttggtacacctaggtaaatgccttcgtagccatattcaccttcaaggtaagcaatcgtcggcatgacgcggcgctgatctttaaggatcgcctcaaccatttcgactagtgaagcagcaggagcataatatgcactaccgttacctaataggttcacgatttcgccgccgccttttcttgttctttcaacaattgcatcaattcgatcttttggaatcaatgtttcaagcgggataccgcctgcataagagtaacgaacaagaggaaccatgtcatcgccatgtccaccaagtacaaagcccgtcacatctttaacagataggtttaattcttgagcaacaaacgtacggaaacgtgctgtatcaagaatgcccgattgtccaatgactttttcttttggtaatcctgattctttataaactgcatacgtcattgcatcaacagggtttgttaacacaacaatgatggcttctggagaatatttaacgatttcgcgtgtcacactgcgcatgattttttcatttgttgacacgagatcgtcacggctcattcccggctttcttgcaattcccgccgtaatgaccacgacatcagaaccggctgtatcttcgtagttagaagttcctgtaatgtttgcatcgaagccttgaacaggacttgcttccagcatatcaagtgctttcccttttgttgggttctcaagctgcgggatatcgactaatacgacgtccgctaattctttttgagccgttagaaatgctgtagttgctccagtaaagcctgctccgatgacagatacttttttacgcttgtttgccatttcctttttcccctttaactttaaagtttaagaatcaagacaagtttttgatgagctcgtcagcaaactcagaacatttcacttctgttgcgccatccattaatctagcaaaatcgtaagtgacgacttttgaggcaattgttttttcaacagattgaatcactagatcagctgcttcctgccagccaaggtgctcaagtaaaagcacgcctgatagaagaacagaagatggattcactttatcaagaccagcatatttaggtgctgttccgtgagtcgcttcaaaaatagcgtgtcctgtttcgtagttgatgttcgcacctggtgcgataccaattccaccaacttgtgctgcaagagcatcagagatgtaatctccgtttaagttcattgttgccacaacatcgaactcagctggacgagttaggatttgttgaaggaaaatatctgcaatgctgtctttgacaataattttgccagcagcttctgcttcactttgcgctttgtttgccgcatcttttccatcttgttctacaatacgatcatattgtgcccatgtaaagaccttgtcgccaaactctttttcagccacttcgtagccccagtttttgaaggcgccttctgtaaatttcatgatgtttcctttgtgaacaagcgtcacagacttacggccttggtcgattgcatattggatagccgctctgacaaggcgagaagttccttcttcagaaactggcttgattccgatacctgacgtttctgggaaacggattttgtttacacctaattcgtttttcaagaagtcaattaacttcttcacttcgtctgatccttttgcatactcgataccagcatagatatcttctgtgttctcacggaagatgaccatatctgtgtcttctggacgtttcacaggagacggtacgccttggaaccagcgaactggacgtaagcatgtgaatagatcaagctcttgtctaagtgccacgtttaatgaacggattcctccgccgattggtgttgtcagtggtcctttgatcgcgattaagtattcacgaatgtcttcaagtgtttgctcaggaagccattctccagttttattgtaagctttctcacctgcatatacttctttccaagtgatttgcttttcacctttatatgctttttctacagctgcttcaagtactcttgatgctgctttccaaatgtcaggaccgattccgtccccttcgataaacgggataattggattatttggtacattcaatacgccgccagtaactgtaattttttcgccttgtgacaatgatattacctcccaggttatgtagtgaatatttgaaacttcttggcttgatgtctgcaagcgaagaagtttttcacgtgattcgttttttgttgatatagaggctgattggccttcctgaggatcagcccccgcttattctataaacattagtctctttcactgatcggaacaaaggtttgaagatcaggtccaatgtagtcagctcttggacggatgagacggttgttgtcatactgctctagaatgtgagcaatccatccagagaatcggctgatcacgaaaattggtgtaaacaagtcatgatcaatcccaagactgtgatatacagatgcagaataaaaatcaacatttggtggaagatttttctctgatgtcacgatttcctctgcgcgaacagacatttcataccatttcggctcgccagtgaggtttgttaaacgctggctcatttcttttagatgctttgcacgcgggtcaccttgacggtatacgcggtggccaaagcccataattttttctttcttctctagcttaccatgaatataggaatctacgttttcaacttcgccaatttctgaaagcatcttcatcacgccttcgttggctccgccatgaagtggccctttcagcgcaccgatagccgctgttacaccagagtagatatctgatagtgtagcaacacatacacgtgctgtaaatgtcgatgcgtttaattcatgatccgcatgtagaatgagcgccttatcaattgcctcaatttctactggtgacggctcttcgccatttagcatatacaagaagttcgcagcatagctgtattcttcttttggctgtacaggctcaagtccctttcgaatgcgtgaaaacgtagcgactagtccagaaattttcgcctgtaaacgaatggcttttctgtaattcgcttctttgtccataatctctgattcgtcatcgagtaaacctagtaaggataccgctgtacgaatcgcagacattggatgaaccccgtccagcgaatacgatttaaagtgctcaatgatttcttgcggaatgtgagcattttcattgagctgctgttttaactcactcagctcttgctcattcggcagctttaagtgccataacaggtagacaatttcttcgaatgtagctttttcagttaaatcatcgatattgtaccctacataagtaagagtatcatcaataattgagcttacggatgaagttgttgccacaataccttcaagacctcttgttgctgtcatgttcaatctcccctttttaaaaagattccccttcgttgcagaattctcgctttttgaaagcgctatccaatccgaataagacggcaggttcagaaaagaaaatgcttacatttacctatacggttagagcgcttttagcctcatatctcttgtgtgatcaatgagttcaaaattaagcctattcccattataaacaataatcagacatttgttaaatgtttaactataattttttttgatatttttttttccagtcttccatataaggcatggaataaagggattttgcttcttttattatatttaattatgtttttttgcaaaagctcacgcaagaaaaaaataaaaaagaaagtggcatgaaccactctcttttcaaccgctgaaaaatttcacagcctgcatcgccaaataagcaattcctgctccgatcagcggaccgacagctacacctttaaataagctgactgccaaaattgtcccgaacacaagcgctgccgtgatatgcggatcattttcgagtagcacaataccgttttttgcgattaatgctactaatatacccgctccaagtgcaatccaagcataagaagatttcatggcttctccaagctgcttaaatccaatgtcacctgttgcaataggaacaagcacagcaattgtaatgacggtgacaccccaattgatgccttttgattggagaaccgggaaaattttttgatccaaaccaatcagcttaatcgcaatcagcacagaaaccgctaaaattaatgaattgttctttgcaataagtgcaataacgagtaaaagaaccaaaaataaatttgcttgagtaaacatacgccgccccttcctttctttttattgcgaccttttcatattactaatctttttgaataaaatgaagtatcggacatgcttgttttttggaggggattgtgtgaatcacgcctatatggccatttttctgcgaagtttgatgatgatcagcattgctgtaattgcggttgtctttttatatcagtcttttccgtttttatatcctttttggattgcacttattgtatcctgcctgattcatcctgccgtatgcaaaatagaagagatcaccggaatgccgagaggaattgtagtagtcattgtactactgctctttttagtggcagcagccggtttcatcacactcttagtagcagaaattatttcaggaagtgcttatttagcaaaggttctgcctggacaccttgatcaaatgattggtattgtcgaacggttttttacagataagattctgcctttgtaccatgatgtcaccgcccaatttaatacgcttcaagcaggtcaaaaggaatcgattttaggacaaatccaagcgctaggcgatgaagctgccgcaaaaatagggacttttctttcaaaaacgctcgagcttatcccggcttttttaggtcttttgcctgatgcagccgcaacccttttgttttctgcactggcgactttttttatcacgaaagattggtttacgttaaaaaaatatggctctcgtatctttcccgcaaaatggatgcagcatacacgcgccattttatctgaaatcaaaaaagccattaccggttttatgaaggcgcagcttctgcttgttgctatgaccatcggcctcgtcgtcattggtctgatcatcttaaaagtcgagcatgcctttgtcattgctttatgtattgggtttgtcgatttacttccttatatcgggagcggtactgtttttctgccttggatcatttactccgttatgacaggaaatctttcactcgctatcgggctcggcattttgtatattgtcgtgctcattcaaagacaaatttcagagccaaaagtcttaagcaagtccattgggcttaatcctttagcaacgcttgtggcattatttgtcgggttaaaatgctttggttttcttggacttgtcattggtcctgcttcccttgtcgtgtggcaggcatttcgtaatgcaggtgtttttagagatatctatcaatacattcggtacggcatgcaaaagtaaaagagaccttgagctcaaggtctctttagcgaataatcgtatagcgattgcgattagacatgtttctaagccagcgttcaaagagcggcttgatttgctttctcgtcatcggaatgagtagcagcgcaccaatgatatccgataagaagccgggaatgagcagcagcagaccgccaatcagaatgcaaaaaccatcgacaatcgctatgcctggcattttaccatactgtaaatctctctgcactttttgaaaagcttcgattccttgctttcttgcaaaataagcacctagtgcactcgtgagcacgatcatcagcatcgtgggcaaaatgccaatgattttacttgatattaaaaataaactgatttccactgcagggaacagaatcaataatagtagcaaatattttttcaaccatatcacctcatggggtatctttcatcgaaagctgttttactttttttagtgtaacataaaaaaagagaggagtcagataactcccctcgtgtgtatgatttaaaggacgcttgctcggcctttgtagatcgctccgcgtgccggatctactgtgatctcttcgccttcttttagcagtgttgttgcgctgtcaagacccacaatcactggaataccaaggctgagtccaacgactgctgcatggcttgttaagccgccttcttcagtgattaaggcagatgctttctctaaagcacccatcatatcacggtctgtacagtttgcgacaagaatcgcaccatcgtacattttttcgtctgcttcttttccgctttgtgcaatgacaaccggtccaaatgcagatttacggccaattccttgacctttcgcaatgatgtcaccaacaacatatactttcattaagttcgttgtacctgtttcaccaactggcacaccagctgtaatgacgattaaatcgccatgtctcacatagcccgtttcgatcgacttctcgactgcattctcaagcatttcatcagtagacgtcgtttttgatccgctctttgcaaatacaccgaatacgagagacagctttcttgctactgattcgtttgctgtgaccgctacgattggtgcttttggtctatattttgaaatcattctcgctgtatgaccgctttccgtaggtgtcacaatcgctgccacgtcaagcttcatcgctgtatgtgcaacagattgaccgatggcatctgtaatgctgacttctacttcttcgcttctgcgagaaagaattgctttatagttgagtgcatcttctgaacgtgatgcaatgttatgcatcgtttgtacagcttccactggatatgttcctgctgctgtttcaccagaaagcataatcgcatctgtgccatcaaaaatggcatttgccacgtcacttgcttccgcacgagttggacgaggattacgctgcatgctatcaagcatttgggtagctgtgatgacaggtttgcctaaacgattgcattttttgatcagcattttttgaacaagcggtacttcttctgccgggatctctacaccaagatctccacgcgcaaccatcaaaccatctgatacctcaaggatttcatcgatgttatcaacaccctcttggttttcaatcttaggaatgatttgaatgtcagccgcattattcttttcaagaagctcacgaatttcaagcacatcagaagctcgtctaacaaaagaagcagcgatgaaatcgacgccttgttcaattccgaacagaatatcattggcatccttttctgtaatacctggcaagttcacacttacacctggtacgtttacaccttttttgtttttgagcgtgcctgtattcatgacttttgtgacgatttctttgcggtccatgttaatttctttcacttctaaaccaataagaccatcatctaatagaatcgttgagcccacttctacatcatgaattaaatcttcatacgtcacactaattttttccgtatttccaacaatgtcttccatactcacgataagatctgcaccagcgactagctcaattgagccgttttcaactgtacgtgtacggatctctggaccttttgtatcaagaaggatcgcaatgtccttgcctaatgttttacctgctttacgaatgttttcaatgcgtgcaccatgctcttcaaaatctccatgagagaagtttagtctggctacattcattcctgcttcaatcaattcagtcagcttttcaatggtttcacttgctggaccgattgtacaaacgatttttgtctttctcattactgttcctcctaaggtcttctcgttttatatagagagctcttgtgaaagtcggtacatattttggtcgactgtatgttttttatctaagatatctaaaatatcgtggtgaacgagttcgttgctttgaatgcccacacagcgtccgccttttccttcaagaagaagttctactgcgtatgctcctaaacggcttgccagtactcggtcaaatgcgcttggagaacctccgcgctgaatatgtcctaagacagatacacgggtttcaaggcttgtctcctcttcaatccgcttaccaaattcaacaccgctgcctacgccttctgcgacgataatgatactgtgcttcttgccgcgctcgtgccctcttcttaacctcgcaataatttcatccatgtcatagtctgcttcaggaatcaaaatagattcggctccgcctgcaagacctgaccaaagagcaatatcaccagcatgtcttcccattacttccactacgtatgtacgttcatgagatgtggctgtatcacgaattttatcaatggcgtcaatgactgtattcagtgctgtatcaaagccaatagtgaaatcagtacctgggatatcgttgtcgattgtacccgggacacctacacatggaaaaccaagctcagttaatttcttcgctcccatgaatgaaccgtctccgccgatcacaacaagtccttcaataccgaatttttttaagttctcaatgcctttttcacgaccttcaactgtcttgaattcagggcatcttgccgtgtaaagttttgttcctccacgatgaatgatatcgccaactgaacctatttcaagtttctcaattttaccgttaattagacctgaatatccattataaataccgtaaacttcaacattatggtaaatcgctttccttacaactgcgcgcacagctgcattcattcctggggaatccccaccgctcgttaaaactcctatacgcttcatctttttcacctcagagaccatatatgaattaaacataccatttccactgcttgaaaacaatcatgagcaaaaccggatgttttcaatacgtatttctaaaaccgtacttattatacaattaaataaaccgtttttaaacaaaagttaagaaagtcatgaaagcaattctttcaaaaacgaggaagatcgatccttctaaagcttatcatatcaaggttttcagacgtttcaaattttatgaaaacaaaagaaaattattttcaaatagcgcttacatgagggcggttttcatgaaaaagggtgaaaaaaataaacgccagccaaaaaggctgtacgtttatttagtttaccccaatatattgattttcaaccgatactttcccgattgctttgtatttttgatatctttgttcgactagttcttcaggtgttagtttgagcaaagatgtaagtgactgttttaatgtttttttaatgtaggctgcttgttgtttcacgtctcgatgtgctccaccttgcacttctttaataacatcatctataatatctaattcttttaggtctggagcggtaattttcattgtctctgcagcttttttcgcaagtgatgagtccttccagagcagtgctgctgcaccttcaggtgaaatcactgaatacgttgaattctctagcatgtataggtggtttcctacgcctaagcctagtgcgccgccacttccgccttctccgatgacaatacagacaaccggtacacgaagtcctgccatttcgaataggtttttcgcaattgcttcactttgtccgcgttcttcagctgctttcccaggataagctccttttgtatcaataaagcaaatgatcgggcgattaaatttatctgcttgtttcatcaagcgcagcgctttacggtagccttctggatgaggcattccgaaattacggcgcaagttttcttttgtgtcttttccgcgctgatggccaatgactgtgacaggaaaccctttaaacgtggcgattcctccaacaatggcttcatcatcaccatagaaacggtcaccatgacattcgaaaaagttgtcaaacagctcttgaatgtaatcgagagttgttggacgcatcgcatgacgagcaatttgcactctgtcccacggctttaaatttgtataaatgtctgcttcaagcttgctcagacgtgtttcaaggcgctcaatttctgcacttaaatccatttctgagttttgtgtgaactttttcagttcatcaattttcgctcgaagttcaatgacaggtttttcaaattctagttctccagccactctcgttcacctcctgtgctgtgtaatgctaagattcggcctagtgtttctttcatctctgcacgatgaatgacagcatccagctgtccatgcttcaacaaaaattcagccgtttggaagtcctctggcaggtcttcacggattgtttgttcaatgattctacggcctgcaaacccaattaaagcaccaggttctgcaaagttgtaatcaccaagagaggcgaaactagctgatacaccgccagttgttgggttcgtcatcacagagataatcaaaccttgatcctcgctgaacagttttaatgctgagcttgtttttgccatctgcatgagactgaggatcccctcttgcattctcgctccgcctgatgcagtaaagatgataaatggcaccttgtccgcttttgctttctcgatcgcaagtgtgatcttttcaccaacaaccgagcccatgctgcccatacggaatgtggcatccatgacagcgatcacagcacgctggccttcaatttcaccttgacctgtgacaatggcttcattcaaagacgttttttctctgtctttctcaagcttttcttcgtagcctgggaatccgagcgggttttctgagatcaggtgcccgttaaattcttcaaatgtgccttcgtctacaaggctatcaatacgctgctttgcattcatttgcaaatgtctgccgcaattcatgcaaacacgtaaatttttatctaattctttggtgagcattatttttttacattgcggacatttggtcatgatgccttcaggcacatcttggcttgcctgttcagagggtacagatgcatattttttctttttactgaaaatatttttgattgacaaatgactacctccctttttgaagggttttttctttacacgcacatccactattataggacatgtcataactgtaccgaaactattgtactttttttgtcaaacgctgtcatccttcattcaattttttcaatggggaattgatgagaaatgagtatgtgtttggggcgctgagcagttgatatatgtgaattgtgaacgtctacaaaaaaatatcattccggatgaaaaaattttcgcgtaagagaggaaatggtgcacgtctttcctccaatttcagaaagaacgtgcacacttttccaattgattattcgccgataatcgttaattttcttgttttttcagcgactgcttctggatcgactttgattcttgcaacgccagtttccattgctgcttttgctaccgcttttgctaccgctggtgctacacgtgcatcaaatggttcagggatgacgtattcagctgacaatttctcatctgcaacaagagaagcaatcgcttcaacggctgcaattttcatttcttcgttaatgtgagttgcacgtacatctaatgctccgcggaaaattcctgggaatgccagtacgttgttcacttggttcgggaagtcagaacggccagttcctacaacacttgcacctgctgcatgtgcatcttctggcatgatctctggatttggattcgccatagcgaagatgacaggatcttttgccatttttccaaccatttcttttgttaaagcgcctgctactgaaaccccgatgaagacgtctgcgccttcaatgacttcttctaatgaaccttctttacggtcttggttcgtgaatttagcgacttcatttttcactgtattcataccgttcgggcggccttcgtaaattgcgccttttgtatcacacatgatgatatcacgtacaccgaaatgatatagaagcttgataatcgcaattcccgctgctccagcgccgtttgccaccactttgatggaggacattgattttccagacagtttcaaggcatttacaagtcctgctactgtgacaatcgctgttccgtgctgatcatcgtggaacactggaatgtttgtctcttttttcaagcgctcttcgataatgaagcagtttggagctgcaatatcttcaaggttgacaccgccaaacgttggctcaagaagctttactgtttcaacgattttgtctacatcgtttgtcgcaagcgcgatcgggaaggcatcaacgcccgcgaagcttttgaataatacagcttttccttccattactggaagagatgcttctgcaccaatattaccaagccctaaaacagcgcttccgtctgtgacaacagcgaccatattgcctttcattgtataatcatacactttgcttgtgtcgtcataaatatctttacatggttctgcaacaccaggtgagtaagccaagctcaagtcttttgcatttttcacttgtacttttgattttgattcgagtttgccttgattctctttgtgcatatgtaatgcttcttctcttaatgacatgtgtagaacactccttcaagtggaaaatgatttaatgaattgctaagttgataagcacatactggcagttttaaatacacagaatctttaaaatgataacacaataggtgaatttgtaaaacatattcaggtgatttgtcatcatttaatcacaacgttttgttcaccgagcagctcttttaactggaaaatcacagcatgatctgcatgaaccttgtatgcatctggaagtctcactgtctttttttgcttctcataatacaaatagacatctgcttctccgctgtgcatcgagatcacccgctttacttgctctagcagttcctgcgtatggttttcttctttcacccgaatgtagacagactcttttctttgtgtgcccatctcttcaagcagaacggcttcttgcacgatgatttggctgctgtcatttctgacatctattctgccttcaacataaagcatggcgccctcctcaagtaagggggacagctttctaaattgctctggaaagacgacgccttccatttctcccgtttcatccccaaatgtgacaaatgccatcgattgtccattttttgtccgaatcgatttcacttttgtcaaaagaccacccattgagatctttcgctttatataggaagaaagtctgatgatttccactgcaccattctctcttaagcgatctcggtacgtttgtacaggatgatttgataaatataacccaagtgcctctttttcaaattgcaggagatcgacaagcggcagttcttctatctccgcatattttggcttaatggagaaggttgtatcccccagaaagtccagttgatcatctggatttaaaaatgacacgtggtctaatgcaatatctattgatgccaataacgaagcacgatttggataaagctcatccatcgcccctgaaaaaatgagcgcttcaatcgtttttcggttgacactctttgctgatactcttgcgcaaaaatcaaataaatcttcaaacggcttttcctgtcttgccctgtatatatcctttacagctgacactccgacatttttgatcgctcttaagctgtagcggatctcccctttttcaaccgtaaatggaaattcactcttattaatagaaggcttcaacacagatatccctttttcctttgcctcatagaaatattgagcgactttgtcttcatttccaatcacactcgttaaaagtccgcacataaaatataacggataatgcgcttttaagtaagcaagctgaaagccaatcatgctatatgcaacagcatggcttctattaaaaccatagtttgcaaatttgacgattaagtcataaacgtcatttgcaatgttaacaggatactccttttttaggcatccttcaacaaaatggcttcgctcttcatcaaggacctttttatccttcttcgaaactgctcttcttaatagatctgcctcgcccagctgaaagcctgccatcttcgccgcaatcagcatgatttgctcctgatagacgatgaccccatatgtgtcctttaaaatgtcatacaaatcaggatgcggataagagaccttgactctgccgtgctttcggtcgataaagagcgggatattctccattggacctggacggtagagggcattgaccgccacgatgtcttctaaactagagggcttcaggcgtctcagcacctgacgcattccttgtgattcaagctggaaaatcccagttgtatctcccgctgataacaattcaaatgttttctgatcttcatatgaaatgtcactaaagttaatgtggacgttttcctgtctttcaatctggtttttaatggattcaattaaggttaagtttcttagtcctaagaaatccatctttaaaagtccgagatcttctaaataattcatcgcatactgcgttaaatacacaccatcatggccgtcttgaattggaacgacctctgtcagcggctcctcgcttagcacaacgccggctgcatgtgtggaggtatgtcttggcaagccttcaacctttaaagcggtttgaaagacctttcgaagctcctcggattgctggagcatcgtttttaattcaggggatgcagccaccgcttctttcagcgtcgttcctggctttgacggaatcagctttgcaagacggtccgctgcctttgaatcaatccccatcacacgtccgacatctcttaaggctgcctttgctgcaagtgttccaaacgtgacaatttgtgccacatgcatgtctccgtatttgtcttttacataagaaatgatttcatctcttctcgtatcggggaaatcaatatcaatatctggcatactgattcgctcaggatttaagaaacgctcaaacaacagaccgtgacggagcggatcaacatctgtaataaacaatacatacgcaacaagtgaccctgctgccgatccacgtcctggccctgtgacaatgccttgatcatgggcatacttcataaaatcccacacgatgagaaaataatcactgaaattcattttttggataatgctcagttcgtactcaagtcttttcacatacgtatcatttgaagcaatctttctttgcttcatcccttctgcgcacactttgcgtaaaaactgatctgctgttgattgatcaggagtcggataggaagggagttttgtctgcccaagatttaaatcgacttcacagcggtctgcgatctccaccgttcttgtcagcagctcctcatcttgcgcataccattccttcatttcctcaagggttctgaaatgcttttctcctcggtcttcctcaatctctgacagctgctgccctgctttaatggcttttaaacacgtataggcggttttgtcttctcgattgatatagtggacatctcccgtcgcaacaagaggaatctccgcactttttgagacgtccctgagtttaccggcaagcgattcgttttgctgaaatggctgaagtgcgatgtacacatgtccctcaccgaaaatatctttcaattgtttcgccgcatcatgcgcttcttctatctgatcatgctgaagcagcgtttcaatgtagccagaagcgcctggcgtaatggcaatgagcccgcggtgatagcttttcagccatttttctttcagtccagcttttgattttgatttcagcacactgctgattttgatcaagttttgatagccttcattgtttttggcaaggagtaccaagggataagcctctgtctcttgttcatctatgaagacagaagctgttaaaccgatgaccggcttgatgccatgttttttacattccttataaaattcaaccgttccatacatcacatggtcatcggtaagagcgagcgccttgcagccaagttctttcgctttcagcacgagctcctttacttttgccgcactgcttaataagctgtatccactgtggacctgaagatgaacataagacatgcttaatccactcctttcgtctaaagtcattctttcattataaaacgcgatgcggtgagaaacaaatgttctttcttttctgtccgttcatacttgtcctgcacacaccatatattgaatagagtgaggtggacacaatggatgtgaaggaagcttttattccgaattttattagctgttattttattgctcttggggtcattttgggcggtgccatcataggtggtgttggtgcttatttatctggtcagccgcctttatccattattacgagtcttgccaaccgtttaaagatttgggcgcttgtcgcagctatcggtggaacttttgatgccgtttatagctttgaaagaggcattttcgaagggaacacgcgtgatattttcaagcagattttattaattgtctctgccatgggcggtgcgcaaacaggttatctcattattacgtggctcacacaggagcatgtgtcatcatgagggtgccggagctgtacaaacgtccaggctggcagcgttttttttgcagggatgatgtttggcgcgattgtgagctggctcattttcctctttacatacggaacctttcaggaaaagcaggtgacacagcttagaagccagcagcaccatatggacagtctgaaagaacaaatcacactctatcgggaagatttgcataagttaaatgaggataataagaaacggctgctgatccaaagcgtagatgtccatctcgtcaatcgtgagcaatataaaatcccagagccagatacgctgaaatttgaagatcaggtcaaagaggatatctcagaggtcattacaaaggatattgaaagtgtctataaaacaaaggaattattaaaacggacggtggaaaacaaagaatataccattcgggaaaaggcataccgcgccaaagtgacagagctgacgatttatacgaagctttcacttgaagtgcgcatttcatttgctgaataaatgatcatgtggaatttttatgaatttctgccctcaatgatcgcttttccctcattatttttatacactaaaagtagaacgagatctaaaacagaaagaggtgaggacaatggaggtttacagctatcgtcaaatggcacgagacaaagcaagccggatcaaggacggtatgtgcgcttatgctgagacagaaatgatggctcatttaattaaaaaagaattaaagcatcaaaatctccaagcctatgaagattcaactgacatcggctgctggtttatccctgtatgcaagtaacccttttctccatgacaaaaaaagagagaggggacttgaagccccctctctcatgatgatgatttacatacttcttctaaatcacgcaaaatctcatctgccacggcccaatcataaatagacgcaccagctgcaagcgggtggccgccgccatgatattttttcgcaatggtattaatgacgacgcctttcgagcggaatctaacacgaatctgatcgttttcttccacaaaaaagacccatgccttaatccctgcaatatttccaagtgtcccaacaagctgtgaggcttgctgcgctgttgtttggaacgattccaaaatatcctgcttaatgaaaacagaggcgaccccattctctgacaaagaaatatgttgaaaaatatagccatttaatttcacgacattcagatccgtctcatacaattgattgaaaaggtctgaagatgaaaatggatattcaataagttctccagcatatttgagcgtctttttcgtcgtgtttgggaaaaggaagcggcctgtgtctcctacaatgccggcataaatgagttcagccgcctttgtattcagctgatatccttcttctttcccctctaaatacaattcataaatcatttcgctcacagagcttgcctctgtatccacccaaagcaaatcaccatacggatcttcatttggatgatggtcaattttcatcagcttatcgcccattgaatagcgctgatcgtcaattcttgcttgattggctgtatcacagacaatgacaagggcatctttgtacacgtcatccggcacctcatcaagttcatacaaaaatgaaagggatggctccggggttcctgtcgcataaatatttttttctggataggtggcacgcaagatttccgtaaggccgcactgcgatccatacgcatcaggatctggtcttacatgtctatgaatgatgatggtgtcatataatgatatggttctaatcagttcttttttcataaaaactccttcttatccgatactctttttattattaaatcataatctatcctgacggaaaagtgagaaatagacaatttattctagtaagcaagcctatttacgtttaaaatagggttgtaaccacttacaatggaggcttggcacatgcttgttttgattgtgtttattatttgttctgccatgttttatttatactacaaagcaaagaatgtccgtacgaaccgtccagtcgaaaagaaattctggtcggcgaaatccagtatggcacttggctgctttgtcctgctcttcggtgtgaatcaattatttttaaaccgctcgtcactcgcatttgtcattggatttatttttgttgctgtcggtatcggcagtacgtgggctggatataaagcctacaagcattaccttccgctctttttaaaggaaggcgaaaaagatcacgcataataagagagaagggctaaaatgatgtttattttagccctttgtcatttttgtcatcgcccttttacgattatcctctctccatcagctgcaccatcagcatcgctttcccgacgatattcgattgatgataaacctccacttccagctttccaaacttgcgtcctacttctaaaatatttggcttgatctgtatcgtggattccatttgaaccggttttaagaagtagacagagagactttcgacaatcagctccccttttttatgagactttaagaagcggttggcggattcaattaaaatttgcgtgaacactccatatgaaatgtttccaagctggtttgtcatttggggtgtgacctcatattgatacacagcatctgcctttggcttatctgtatcggtatctttaaagcctcttgagacaacatcatccagtttttcgccgacctgcggctgcttttgaatcatttgaagcgccttcagcacatcctgacgactgatcatcccaattagtttcgcataatcatctacgactggcagcacctcaatgccttcccataccatcatttgagcagcagaggcgacagaggtttttccaatgactgtcagcggatttttcgtcatcaccttttcaatcggtgtagagcggtcatgccccgcgatatcctttgaggtgaggattccgtgaattttcatttggtcgtctgcgaccggaaaacggccatggccagtttcataattcttttcataccatttttcaagcttatcctctggtgataaatacaccgttcgttcgatcggcgttaaaatatcttccacaagcacaatctctttttttattagttggtcataaatggctcggtttatgagagctgctacggtaaatgtatcgtagcttgtcgataagatcggcagctcaagctcatctgcgagctgaatgatttcatcatctgttgagaagccgcccgtgaccagcacagctgctcctgcctctaatgcttgtctgtgtgcattgatccggtttccgacaatcagcaggtttccagctgccgtgtagcgcatcatcgcatcaagctccatcgcaccgatgacaaatttgtttaatgttttatgtaagcccgttcgtcctccaagcacctgtccatcaataacattgaccacttctgcatatgtcagcttttcaatattttcttttttcttctgttcaatccgaatggtaccaactcgttcaatggtactgacgaatcctttattttcagcatccttgatggcccggtaagcggtcccttcactcactttcatttctttcgcaatacgccggacagaaattttctctccaacatctaatgaatcaatatacgataaaatttgttcatgctttgtcgccaatcccgttcaccctttttgttttcagcgttttcatctatgtttcattataagggcaggaggcttttaatagcaatttgtctttttcagcacgatacacgtaaacaaaaaaagccggcattggaatgccggctttttgctatgttgattaaatctcaatcgattctccgctgtttaacacatgaccaacgccgccatgcaggctgtctgcaaatgcatgcgggtcctgttcaatcggcgggaatgtgctgtagtgaatcggcacgacctgcttcgcccgaagccattcggctgcgattcttgcatcgtccggccccatcgtgaaattatcaccgatcggaaggaatgcaagctcaatatgattcagctcaccgatcagcttcatatctgaaaagagcgcagtgtctccagcatgataaatcgttttgccctctgcagtaaataaaatacctgatggcatgcctgtatacgtaatcgtttttgcatcttcatcaatgacagctgaaccatggaacgcttgcgtgagcttgactttaccaaattcaaactcacgtccgccgccgatatgaagcgggtgcgttttcaccccttgccagcttaaataaacggcaagttcgtttggcgcgacaacgagcgcgtcattgtttttagcgatttcaatggtgtcaccgaggtgatctccatgcccatgtgtcagtaaaatgacatccgctttgacatcttgcggcttgatatctgtgtgtttatttccttttaaaaatggatcaatccaaatatggtatccgtttgtttcaatgtgtacgactgaatgtccgtgatatgtagctttcatgtgagtatatccacctttcgaatttgatctcatttcatctattccctgtataaaaagctgaaaaacttaatgtctgtgaatgacgttaagaccacctgttgcttcaataacggtccctgtaatcaggtcagagcggtcatcgcataaaaatgaaatgatgcgcccgatatcttctccagtaccagacctgccaatcggcgtttcatcgtctttgatctggcgtgcttcttctattgtggattctttcatgtctccaacgattttgcctgggcaaaccatattggctgtgatgccgttttcggcttcttcaatcgcaatggttttcgtcaatgacgccagccccacttttgccgctccgaaggctgatctgtgcatccagcctggtgcatggtctgctccttggaagccatacgtgataatgcggccaaagccttgttttctcatcatggggatgaccattcggaacaaatgaaacacagcggataagttgccttccatcatttgataccattcatcttcagagtaatccgctagtttcttacgttcaaaaatataaggtccggcattgttaatcaaggcatcgatccgcccaaatcgctctgctgccagctctaccatgttttttaaatcttctttgtttgtcacatcaccttggacaaattgaagcttttcttcatattcatgcaattcttctttcatctgccgcacagcttcatcatcacttcgataattcactgtcacagaataccccatattcagtaaagactcggtgactttcctgccaagtcctttagaacccgctgttattaatgcgtgtcgcacacaatctcctcctaaagcaaaggttgcaagttcacatgtttcttatctttactttactataaaccagcatctggcgcacttatgaaccctttctgctatcatgttctccaaggaagaggattctcctttctgacagcaaaaaaaccatccgcatcatacgaatggttttttgacgtgttacgctaggcaggcttttgctttttctaaagcgagctgaatttgtttaaatccagttccacctgcacttgttcttttttcaacagcaacatacggatcaagaacggtgtaaatgtcttcttcaaaaagatcgctcgcttctgtgaatgtttcaaacggaagatcacttaagtagatgcttttttgaatgcatgtatacacgagcttgccaacgatttcgtgtgcttcacggaatggcatgccttttttcgcaaggtagtctgccacttcggtcgcatttgagaaatcttcttttgttgcttttttcatgacatcttcgttcactgtcattgtttgaatcatgcctgtgaagatttgcaggctgccagcgatggttttcactgtatcaaacatgccttccttatcttcttgtaagtctttgttatacgtaagcggcaagcctttcataatggtgagaagccccatcaggttgccatatacacggcctgttttcccgcggatcaattcagccatatccgggtttttcttttgcggcatcatgctgcttcctgttgcatatgtgtcatcaagttcaatgaatttgaattcttgagagcaccataaaatgatttcctcacaaagacgtgagagatgcatcatcacaaggctgctattagacaaaaactctaaaatgaaatcccgatcactcacgccatcaaggctgttttcgtaaatatgatcaaagccaagcagctctgctgtatattcacgatcaatcggaaatgtcgttcctgctaacgctccgcatccaagtggagacacgttaattcgcttcaaagaatcttgaaaacgcgctttgtcacgttcaagcatccagaaataagcgagcatatgatgagcaaaggaaataggctgtgcacgctgcaagtgcgtatatcctggaaaaatcgtttcaacatgctgttctgctttttccacaagcactgtttgaaaggacgagatcagttcaatgatatgctctacttggttattcaaatataaatgcatatcggttgcaacctgatcattccgacttctcgctgtgtgcaatttgccgccaagcggaccaatctcatcaatgagcattttttcaaggtttaaatggatgtcctcataatcgactgagaattccaattcatctgcctctgcctttttcatgagcgtattcagtccatctttgatggcagcggcctcgttatcgcccaggataccgcatgtattcagcatacttgcatgagcaagggagccggtcagatcttctttgactaattgtttgtcgaaatgaatggacgcgccaaactcatcgacccatttttctggtgttttttgaaatcggcctccccaaagctttttcatgctttaacctgctcctttttattcacgatgctgtttacttttgttggtaagccccaaagattaataaatcctaccgcagcatcatgatcgaattcatctgcttttgtgtatgttgctagattttcatcataaagtgaatatggtgatttacgtccttctacaatggcatggcctttaaatagtttcacacgtacaacacctgttacgttctgttgtgtttcttgtaagaaagcatctaatgcttctttaagcggtgagaaccataatccgttgtatattaattcagccattttttgttcaatgattggcttaaagtgtgcgacttctttcactagtgttaaatcttcaagctctttatgcgcttttagaagtgtgacagcacctgggcactcgtacacttcacgagatttgatgcccacaagacggttttcaacgtgatcgattctgccaaccccatgctgaccagcgacttcatttaaatgaaggatgagatcagataatgaatactgaataccgtcaatggctgttggttttcctttttcaaacgtgatttcgatgatctcaggtgtgtcaggtgttttttcaagtggagtcgttagatcatatgctccttctggcggtgcagcccaaggatcttctaaaatgccgcactcgttacttctgccccaaaggttttggtcgattgaatatgggctgtctaagttaatcggaattggaataccgtgcttttgagcataatcgatttcttcatcacgagaccatttccactcacgcactggtgcaagaacttctaggtctggattcaatgctttaatagatacttcaaaacggacttggtcgtttcctttaccagtacatccgtgtgcaaccgctactgcattttctttttctgcgacttccactagtttttttgcaataagtggacgagataatgcagatacaagcggatatttcccttcatacatcgtgtgtgcttgtaatgcagtcagtgcaaattcttcagcaaactcttcttttgcgtcaataatataagactgaaccgctccgacttgaagtgctttttgttgaacgaatgctaagtcttttccttcaccgacgtccaggcagcaagcaacgacttcgtatccttgctcttgtaaccatttaactgcaacagaggtatcaagacctccggaatatgctaatacgacttttttattttgtgacatgattgaaaagctcctctcgcttgttttgattctgtgaatgttttttgcataaaaataagttttaatttataaacatgcatttagtatgtatacactgtaacaaggaaaaattgttttttcaacccctttatgaaaaaaactccgccaaattttcttggccgagtcattttgggctatttttgatccttttcaagctctcgtaagacgtgaggaagctctggaatgatgagttttgtcatggctaaacgaacagctccagtagagcctggtgtggcaaaaaccgctttttgattgacgaccccagccgctgcccgggacaagatagcggctgaaccaatgtcttctgtatagctcagcatgcggaagatttcgccaaagcctggcagctccttggagaaaagcggggtgatcgcttcaatggtgacatcccttgctgcaattcctgtgcccccgtttaacaagacggcatctattttcggttcgcttgttccctctaacacagcgtcttggatcgctccaatgtcatcttttacaatatcgtatgcaagaatgagatgtccctgttctttaagcaaatcaatcatcaggcggccgcttttatctgtttctttcgttcttgtatcactgaccgtaataacttttaaataaagcctctctttcgcctcacgtttatgttctgtcacgctcattttctcaccgctcccttttgcttcgtattggacaacattatagcatgctgcttttaacagaaaaaagctcttttccttattggaaaagagctttttcatttttgattatgctaagcgcataacgtctcttgcaatcattacttcttcgttcgttggaatgacgatcacttttacaggagagtgcgggtagctgatgaatgcttcttcgcctctcatgttgttaagagaaggatcccagtaaacgcccatgaattctagaccacgaagtacacgagctcttacttctgaactgttttcaccgattccagctgtgaagatgatcgcatctacaccattcattctcgctgcataagaaccgatgtatttatgaatacggcttgcaaaaatatcaagagctacttctgcacggtcgtttccttcttctgttgcttcttcgatatcacgaagatcacttgatagaccagacacacctaaaagaccactcttcttattcaaagtagaaagtacttcttcagctgtatgtcctgttttctccataataaatggaataagggcagggtcaatgttacctgaacgtgtacccattgcaacacccgcaagcggtgtgaagcccattgaagtatcgattgattttccgccttcaactgctgcgatactcgcaccatttccaaggtggcaagagatcaaacgaagctcttcaagaggacggcctaatagctctgctgcacgctctgttacgaacttatggcttgtcccgtggaatccgtatttacgaataccaaagtttttgtagtagtcgtatggaaggctgtataggtaagactgctctggcattgtttggtggaaggctgtatcgaacacagcaatcgctggtacgtcaggcagaatttgtttgaatgctttgattcctacaacgtttgcagggttgtgtagtggtgctagctctgaaagctgatcaatgtcattgatgacttcatctgttaaaagaacagagtcgctgaatttctctccgccgtgaacgacgcggtgtcctacgccatcaatttcattaaagtctttgatgatgttaaattcaattagtttttcaagcagcattttgaccgctactgcatgatctggaatatctgtgatttctgttttcttttctccatctacagaaatcgtgaagatactgttgtccattccgattctttcaacaaggcctttggttaaaacggtttcttctggcatgtcgaacaattggaatttaagagatgagcttcctgcgttgattgcaataattttagacattcctgtcgctccttttactcagttgttatataaggtttcacgttttttccggtgctatattcaacctgtttgacgggtcttttatagtttaacgataagtccgaaaaatatctgactttttcatttaaacattgaaaactttgcatttcaagtgcaccttcaaactgttaccgcttacatcgataagtcgttattttctgaataataaaatagccagacatcactctggctattctttcgtttctttttcttctataaaccactggtctaattttctcatcacatccaccatggcttccttttgtgagaaagacggcagattggcaaagagcatccgttttggtgcttccaagccttcctttttcttttgcatcacaaacaagcttttggcgtgctttttgtccttgaacatagagaccggcagctgaattaacgcattcatatatgcatgatctttgataaaatcctttaattgcacgctttcttttccttcaaacaaatcgtttggaatgatgaagaataagaagccgccttctttcgtataacgaaggctttgttcaatgaataaataatgggcaaaggcatgtccttcttttgccttcaaatcatagtctgctgcacgctcatcatttgggtaataaccgactggcagactgcatacagtgacatctactggtgagatcaaaagcggctcaaggctgtcttgatggaaaagctcgacttccttctcttccaagtttgcctgtgcccatgcaattttaatgagtacatcatcaatttcagacgcaaagccgcgctttgtttctgcagtgagattgtttaagacagcaagcagtaagttccctgttcccgctgctggatcaaagacaacaagctctttttgtccttctaaaaatttattcaccaaatagctgacaaacagcccgatcgtatctggggtcatctgacgatttggatgggaaatatccttttgtcctttcaatacggcgagctgaaacgctttacgaatctgctcatgatcataagaggcaaaatctgctttctctattaaatcctttagtaaaccgtctcgatcatttgcttggaaaaaggcttctcctgcttcagccaatgcttcaatataggaaatgctttggtccttttttaatcgaatagaagctgtatcgagcagctcaaaaatcgtacttacttgatctttctgcaatgcttttctctcctcgctttgttaaaagctatatctcctcattgaaaagagccccaggatgaagccggagctcttgtcgatgctgcttttataacagtgattttgcagcttcaatggctttttcataatttgggtgattcgttgcttcgcttacgtattcagtgtaaaccacttttccgctcgggtctaatacgaagactgcgcgcgccaataaacgcaattctttcatatatactccgaatgcttcaccaaatgacatatctctgtgatcagataatgtttcgacattttcaattccgtttgctccgcaccagcgtgcttgtgcaaatggaaggtctgcactaattgtatagatattgaccggacctaaaccggctgcctcttcattgaaacgtcttgtttgtgcgtcacacacacctgtatcaatagaaggaatcactgagatgatcgtcacttttcctgttaaatctgaaagtgaaacttcccctagtgagttcgttaataccgtgaaatctggagcctgctcgcctactttcacttcatttcctacaagcgtgacagaactccctttaaatgtgatcgatgccaaaacaattcctcccttatcaaatgtatggttctatcatagtagagaaagcaaaaaactgcaaagcctaatcgtcacttttgaaaaaaaagttaactgcagcgcagctaactttttaaaggtctatgtcatctagttttcgttctttatgacggttctcccgttcatccttcttaaacatgtgctgaagacgttcaattgcttgaggagcagaatccaatattttatcaagcagatgtgtatgttcatccaaatgaagcattcgaacgccatttgttccgacaattaagaaggcgattggtgtaatagacacacctccgccgcttcctccgccaaatgggagtctcggttcttttcgttcttgatcatcagaacgtttttctttcttttggttcccgttaaattcactgcctccagctgcaaatccaaaaccaaccttcgacacagtaagaatgacactgccgtcaggggtttcgactggatcgccaatgatcgtattcacgtctatcatttcttttaagttttccatcgctgtcttcataagaccttggattggatgatctgccattttcgggttcctccttaaacagatgattcattcttcgttgcttgaagagaggcattttttctcgcctttcttccttttaaccaatggacaagtaaacgaatggctgcaagcatagcatgtccaatacgaaaataagctatacatgtaaactgggtttgagacacattatgctgaaaggcaggaatgacttcatataccggtttatgcttaaaggtgagatgctcctgcataaaggcaagcagtgctcctttgactgaccacacaccgccggctgctacacctgttaaagcggcgtcatgaaagccgatccatgttgaccagtgaaacgatacaattctgatgtgaatgaagaatttacgcatgatccggtttaaatcgacgatctcttttgtgatgcgctccatttgatgaaggatttgcttcatatcacgttttcccactttttgatgtatggattctttttcgtgactaggggttttggcgctcgccattttcttttcacgtatatcaatcgtttgatcttctggattgaccctcaccatcggaatgtcttttttgagtctgatgattccatataaggtgatgatcttcagtgcaaggtggtcattgtcatttgcatgtgaataatccagtgaaatggttactttcatgaagatcaataagatcccaaggaacaaaaaagctgcgatccaaacgtaaagcactgtgctcacttcctccataacaaatgatgcttctctacgattatggctctcattctggattttatacccaatcatgaaaaaagagtttgaccggtacccggccaaactcctctgattatacgtttgcttctgttttttcatataaatgttcatggacgaccaccgtatcggcaaagtaatcatgaaccccttgctttttcggtgagaacccaacgacagcatagagaacaaagagcgtattaatgtagcgacctacaatctctctaaagaaaatgacatcccatgccagcttcttctcaggctgaagcgagaccactttgatcccaaacaccattttgccgagtgtttgttgaaagattttcgtcatgatggcgaaataaagcaggaatacaatcgtcgttgtgacggagaatggagaaaaccatcctcctcctttggaccagccaaacagactaaagattggagaaaccgtcaaatggttgacaccccagacgacgagccaatcaagaataaacgcccaaaacctaatccaaaagcctgcaaacgcctgtgcttcaatcactgcacgtttcgcaagagtcggattcgattcttcttggctgcggctttcggttacttcatcgaatgtagaatccatctatgatccctcctttattttgaatagagatacatcggtttagacccgtttgagccagccagtgtttcttttagattgagaaaatcaatttcacttttaaagagtttgcttgcgctcatattgaagagagagttccagccaaagctttgagaatagctgatcactgtcgctccttttaaccctttttcatttttcttcattgctttgattgcatcttcataatatcctagctcatcgactaatccgttcgatttcgcctgtgttccgtcatagacccggccgtcagcaattttcttgacgtcctgttttgacatgccgcgtccttcagagatgactttgacaaacccttcatacgagttatcaaccatgctttgcatgatgtcgcgctcatcttttgtcatatcacgatttggtgacatgatgtctttaaattttccgctcttaattgtttcgtatttaatacctaaattatctgccagctttgaatagttcaagctttgcataatcacacctaacgatcctgttaatgtttcaggtgaagcaaagattttcttggctggagttgatacgtagtaaccgccagaagctgccattgagcccatggagacgtaaatcggcttcttcgcttttttcacttcttctaattttttatgtatttccgcactttcatagacaccgccgccaggagagttgacgcgcagcagtacaccttttactgaagcatcatctttcgctttttctagttccttgaggaatgcacgatgatcatatccttctccgcctaacagacttgatgcgccgccattatcttgaatggttccattaatctcaagaaccgcaattttcccagcaccgcttccatcctctagtaccttttcttctatttcatccccaaattgatagctcattttattgtcattgaagttttcgaacaaggccatcgtgacacttatcacaattgaaaatccgaaaacacctagtgcaatgattaacgctacccatcttttcgcattcatctttttctcctcctttttgtctctcttcattgatacgaatattcacatgaaatgtttcacaggaattgtggtttttttacatttcatttcatcatatgatagcacctcttttcattcacgatcaactttacatcgtctcctttgagatgcgcatgacgaaaaattggcttttttatcctccctctgcatctaataggctagttctacaccacaacgaaacacccaaaccactctttcatgagaaagaagctattcaattatgctcaaatcctgcccttttcgaatcccttacattgactcatttctaaaaacgaatgccttcatcatgcaggtttttctaatgtttttactttcatatgaaaaaagtgtaaaatgtgagcaagggttcacatgtaagccctttattattggaaaactatttttgacaacaaaggggagaacgtcaatgacagacaatcgtcgcaatgtatttttcttttacaaaaaagatcatgaattggatggacacatttcttctctggagaagctcgctaccgatcaaggctttcaagtcgtcaagcgtgcagaggatgcccatattattgcttcaattggcggggatggcacatttcttcaagcagtccgcaaaacgaatttccgggatgactgcttgtatgtaggggtatcaaaaacagagaattcgcatctatactgcgatttttcattagagcattttgataaaatgattgatgccatgaacactgaacagattgaagtgagaaaatatccgatcatcgatgtaagcgttgacagtaccaatcagttccattgcttaaatgaactgtcgatccgctcaagcattattaaaacatttgtgatcgatgtgtatatagatgatttccactttgaaacatttagaggagacggaatgattatttctactccgaccggctcaacagcctacaataaatcggtaaacggcgccgtggttgatccgatgctcccttgtatgcaagtcacagagcttgcatcgctaaacaacaactcgtaccgtacactgggtgctcctttcatcttaagcagtgaccgcaagctaacgctgaaggttgtgcaggacggaaacgaccatccaattatcgggcttgataacgaagcgcttggcacgaaacacgtcaaacaaattgacatcggcctttcaggaaaagtcattaaaacagtgaaattaaaagacaactcctactgggaaaaagtaaaacgcagattcctttaatcaaaagctcctttatggggctttttttcatgtcttttcattcacggtcatggttatggtatgatgtcacaagtatgaatgtacgaaaaggagaacacgatgacattacaacaatttgatcaatatccattaagcaatgaattaaaacaagcgctaaaagcacttcacttccatacacctacacctgttcagcacgagacattatccgttgctttttcaaagcaggatctgatcgtcaaatctcaaactggcagcggcaagaccgcagcctatggtttgccgatttgtgaaatggtcgattgggctgaaaataaacctcaagccctcatcctcgttccaacacgagaactcgccatgcaggtcaaacaggatctcacaagccttggacgattgaaacgaatcaaagccgcagccatttatggaaaagccccttttcaagcccaaaaagtagagcttgcacagaaaaaccacattgtgtgcggaacaccaggcagaattttggatcaccttgagaaaggtactctttcattagaaaacctcaaatttttcgtgttagatgaagcggatgaaatgctgaacatgggatttattgatcaagtctcttctattattcagtatctgccgccaaagcgcatgtcaatgctgttttcagcgaccatgtctgatgagatgaagaaattgagcgaacagtttttacaatcaccaaaagtgattgaaatcgcacgcgcggaaacgtctgtacaacaaatcacccacaccgtgattgaaacggaagaagaagcaaaattctcccttcttcagcgtacgatcgtcattgaaaatccagatagctgcattattttctgtaatacacaggacagagtgaatgaactcacaatgaagctggacgaatgggatgtgccttgtgacaaaattcatggaggcatgagacaggaagaccgcttcgctgtcatggatgaattcaaaaacggtgagttccgttatttgatcgcaaccgatatagcagcccggggcattgatgtcagtgatatgacacatgtgattcattacgatctgccctatgaaaaagagcgctatattcaccgaacaggaagaactggcagagcggggaaaagcgggaaaaccattgcgtttatgaccaaaaacgcaatgcctctgattgatgaattaaagcaggaagcaggtattgatttccagacgcagccttatccaacaaaggaagaagcagagcagtatgtagaaagctttgaagaaaagattgaaacaccgattcaaaaggaaaataaacaggcaggcgttgagaaggatattatgaagctttattttaacggcggaaagaaaaagaagctgcgggccgttgatttcgttgggaccattgccaaaatagaaggcgttgccttcgatgacattgggattattaccattcaagacacgaaaacatatgtcgatattttaaacggcaaaggccctcttgtgctgaatgccatgcgccatacaaccattaaaggcaagcagttaaaagttcatgaagcacgttcataaaaagtgaaggctaagcgcctttacttttttatttaaaataaaataagcttacaaaccttgataccgtcagcctttccggcgtccaacatgacaaatgtcatatcgaatacatgatgggtgctactatgagcatgacacctttccttctatactttgaagtagaaagaaacggaaaggacttgaacgttcatgacgacttcaacaaacacacagcagcaagccactttaagaaaacaagttggccaattctctggtgctaattcgaaaaaaagtatcattcaactctttaatacatttattccatttttggggctttggtttcttgcctattatagcctgaacatctcctaccttttaaccctcttctttgcggttatagcagctggttttttagtacgtgtctttattatttttcatgactgctgccatcaatccttttttaaacagaaaccgctgaatcacctgttcggtttcttaacaggtgtactcacccttttcccttatcttcaatggcaaagagatcattcgattcaccatgccacaagcagtaatctagacaaacgaggtactggtgacatttggctcctgacagtcaaagaatatcaagaagcatcagtatggactaaatttcgctacagattttatcgtaatccttttgtgatgtttattttgggaccgatctttgttttcctgtttaaaaaccgtttcaacgtcaaaaatgctcgtaaaaaagagcgctggaacacctatttcacaaacgtatcgattgttttgttggcaggagcgacctatctcctttttggctgggaaggtttgttacttgtccaaggtccaatctttctgatttctggatcaatcggtgtatggctgttttatgtgcagcatacgtttgaggattcttactttgaagcagatgaacattggaattatgtgcaggcagctgtagaaggcagttctttttacaaattgccaaaacttcttcagtggttaacaggcaatatcggttatcaccatgtccatcatttaagtccgagggtaccgaattatcatttggagcatgctcatgagcatagtgagccgcttcaaaatgttccaaccatcactttaaaaacaagtattgagtcaatgaaatttagactttgggatgaagaaacgaaagcattcgttacctttaaagaagcacggcaatctaagaagatgaccgtccctgtcattaaaggagacattctgaagaaaaatgcataattggtgcaagctctttcttacactagaaggagcttgttgtcatttacaggatgcaaccataagttgaatttgataaagtaaggaaaaagaacgaaaacggaaaaggtggcacacggatgaaaaaacagtttaaaattcaaaaattgcatgggatttctccctatatatgggccatttttttcatcctgcccttctattttatctttaagaccccatcgactttaagcattgtgatcggtatcattttaaacgtcgtcttttttgccgtctatcgttttgcctttgtctcaaaaggctgggctttatatgtattcggtcttctattgattgcgatttctactggctatgtgatgctctacagctacatttatttcgctttttgcatcgcctatttcaatgggcatattaaaagaaaagtacccttttatatcttatactatattcatctagggagcgctgccattgcggtgaactttagcttgattttaaaaaagggatggtttctcacacaaattccttttgttgtgatcacactcattagtgccattctcctccctctcagcattcgaagcaggaaagaacgtgaacggcttgaagagaaattagaaaatgccaatgaacggatcgctgaccttgtaaaaattgaagaaaggcagcgcattgcacgtgacttgcatgatacccttggacaaaagctttctcttatcggtttaaaaagtgatcttgcccgaaaactcatctataaagatcctgaacaggctcgtgccgagctcaaaagcgtccagcagacagccagaacgtctctgaatgaagtgcggaagattgtttcctccatgaagggcatacgaatcaaagatgaactgtcgaacatacagcaaattctcgaagcagccggaattgaattgatctatgatgaaaaggaagcgccaaaacacatctctcttcttaacgaaaacattgtgagcatgtgcatcaaagaggcagtgacaaatgtcgtcaaacatagtaatgcgaccatctgtaaaatcaccattcatcaaaaatcaaaggaagccatcatcaccgtcgaggatgatgggacatttaaaggcgattatcctccctctcaaacgaagggtcatggccttttaggaattagagaaagattggaatttgcaaatgggcgcctgcgtattgagacaaaggacggaacaaagctgatcatgagtattccaaatgattcagcagcaaaagaaaaggaggggatgaaatgatcaacatctttatcgcagaggatcagcaaatgctgcttggtgcgctcggttcacttcttgatttagaagacgatatgaaggtagttgggaaaggatcgaatggccaggatgccatcgattttgccaaaaaacaccctgttgatatttgcttaatggatattgaaatgccaggaaaatccggacttgatgcagcggaagagctcaaaggaacagatgtgaaaatcatcattttaacgacctttgcccgctctggttatttccaaagggcgctcaaagctggcgtcagcggctatatgctgaaagacagtccaagtgaagatctggcaagtgccattcgcagtgtgatgaaagggaaaaaggtgtacgcccctgaattaatggaagacttatatagtgacgaaaatcctttaacagaacgagagaaatcggtcctagaactcgtcgcagacggcaaaaacacaaaagaaattgctaaggaactcagcattaaaagcggcactgtccggaactacatttccattattttagataagctagaagtgaaaaaccgcattgaagccattacacgctcaaaagaaaaaggctggtttaaataagaaaaaagatcaggacacatgtgccttgatctttttttctaccaaaaatccccctctattttttatcaccaactatcaaaatgcaattgacaacagaccgcactcctatgatatgatatccaagtgataataattatcattatcactcgtgcaatcaaatacccggcttatgtgccgatttcaaaggagtctacattcatgaagaaaatattgttccctctgatgctcatccttgtacttgcgttgagcgcatgtggcaatagcagcagctcttcctcaaataaaggaaatcaatcaacatcatcagacaagattacatatcaatctgaaaatggccctgtgaagctgccagcgcatccaaaacgtgtcgttgtactcggttcttacacgggtaatgtcatgtcactaggtgtgaacctagtcggcgtcgactcttggtcaaaaaagaaccctcgcttccaaaaggaattgaaagatgtggaagaagtgtcggatgccaatgtggaaaaaatcatgaaactaaagcctgatgtcatcattggcttaagcaatacaaaaaatgtagaaaaactaaaaaaaatcgcgccaacagttttgtttacgtataacaaagtcgattaccttcagcagcatattgaaattggaaaagtattaaacaaagaaaaagaagccaaagcatgggtaaaagattttaaagaacgcgcagctgaagctggaaaagaaatcaaagcgaaaatcggtgaggatgcgacggtttctgtgtttgaaagcggcacaaaagatctttacgtgtttggagatgcatggggccgcggcacagaaatcctctaccaagaaatgaaactaaaaatgcctgaaaaagtgaaagaaaaagcattaaaggctggctactatgcggtttcacaagaggtcattcctgagtttgctggagactatatgatcataagtaaaaacagcgaaatggacaattcctatcaaaacagtgaaatctacaagtccatcccagctgtgaaaaaacatcgtgtgtatgaggcaaatgcagaagaattctattttaatgatccgctcacactcgactatcaactatcattctttaaaaagcactttttaggtaaataaattgaagcaagggagcccttcccttgcttttttcttgtctgcttctagcggcagcgctttttttccgctacaattacatacaagcgaatacaaaaagtgtggtgctggttttgtttaaaattttactgattgaggacgatacaaccctcttccaagaaatcaaagaacgtctagtaaactggtcctatgatgtttatgggattcatgattttcaacaggtgatgcaggaatttacttctgttcagcctgatctcgtcattattgatatacagctgccaaaatacgatggttttcactggtgccgaatgattcggcatcattcaaatgtaccgatcatcttcctctcctctcgtgaccatcctgctgatatggtcatgtcaatgcagctcggtgccgatgattttgtacaaaagccctttcactttgacgtgctcattgccaaagtcagtgccgttcttcgcagggtacatgattacaatgcagaacctgcaagcttaaaggtatggtgcggcgctacgatcgacctagaaaaaaacaccgtcacaaatgatcacggtgaagtggaattaacgaaaaatgaactgtttattctcaaggaattgattcagcataaaaatcatattgtcagcagggaatcactcattcaagcactgtgggaggatgaacggtttgtcagtgacaatacactcactgtgaacgtcaatcgccttagaaaaaaactagatgagatctcccttggcacctacattgagacaaaagtgggccaaggctatcttgcaaaagaaaaggatgatcaatgatgctgcaagcatttttaaaagaacgaagaagctggatcctgttctttcttagtttgcagctcctcattctgtttgttgcttatttggatacgaccattccactggcgtctcttttttatattgtgttattgtctacgtttttcatgatcgtctttctctttttccgttaccgtaaagaaacggcgtattatgagcggctgaaagaatgggatgatcatattgatcatcaaatgcggctcactccatcttccccatttgaacagcttgtacatgatgcgacatcagagcaaattgcccgctaccggaaaatggcagcagagcagcaaatcgcccttgaagaagagaaggatgaattgctctcatggatacatgaagtgaaaacacctctcacagcgatgcacttaatgattgaccgcttaacagagcagccgctgaaatcgaatatgacgtatgaatggctcagaattcatttattactcgatgcccagctgcaccaaagcagaatacgtcatatcgaaaatgatttatttattgaacagcttgacctgcaaagcatcttagcgaaggaaatcaaagcgctccaatcatggtgcatgcaaaaaggaatcggctttgaactcacgctagaagaacgtcacgtattaagtgatacaaaatggttatcctttatgatcagacaggtgctcacaaatgcagttaagtacagtcattcgtccgatattgccattgaaagcaagcgaatgaatgaccaagtgatgctgacgatctcagatcaaggcagagggatagatccaagagacctgtctcgtatttttgaaaaaggctttacctcaacgagacatcacaatgacaccgcctcaacaggaatggggctttatttaacgaaaaaaggagcagacgctcttcatatcaagatcgaggtcaactccacgatagaccaaggcacaaccttcacctttatctttccgaaaaagaatgattttgtgcatattgcgagcatgtgacaacaatgtcacatgctcgtctgttttgttcgccaaatcgaaggaagtgcggcgggcttctttttatactagaggtatcaattaaatagaaaaaggggatcgacaaatgaacattttagaagctcgcaaaatatataaaagctatggaaataaattcaacaaacaagaggtgctgagcggcattgatttgaccattgaagccggagaatttgtcagcattatggggccatcaggctcggggaaaactacccttctaaacgtattgtcctctatcgatcatgtatccagtggatcgattcgtatcgcagatgctgagatgacacaaatgaaggatcagcagctcgcagaattcagaaaaaagcagcttggctttgtctttcaggattataacttacttgatacactcacggtcaaagagaacatcctcttgccattatccatctccaaaacgccgaaaaaagaagcttttgaacgttttcaacagctcgcggaggacatgggcatctatgaactaagagacaaatatccgaatgaactctctggtgggcaaaagcagcggacatcagcggttcgtgccttcattcatgagccgagtctgattttcgcggatgaacctaccggagcgcttgattccaaatctgcatctgatttactcaataagctgcaagatttcaatcgcaaacgaaaagcgactattgtcatggtgacacatgatcctgtcgcagccagctattcaagacgcgtcatttttatcaaggacggacaaatctatactcagttgaataaaggtgctttagagagaaagatgtttttcgaggatattatgaaaacgcaaggtgtcttaggcggtgtgaagcatgaacattaatcagctcgtcttccgtaacctgaagaaaaatttgaagaattactatttatatgtgtttgctctcgtgtttagtgtggcgctctacttttcttttgttaccttgcagtactcaccagcacttgatgatgtaaaagggtccattaaaggcggtgcgtcgattaaagccgcttcggtactgctcattgccattgttgggatcttcctgttatatgcgaacagcatttttattaaacgacgagggaaagaaataggtctcctgcagctcattggcatgacgaaacaaaaaattgccaaactgctcaatgcagaaaattttatcctatacgtgttctcattggctgttggcatcatagctggatttatcggttcaaagctcatgctgatggtgctatttaaagtaaccggcgttaatgccatcgcgcatctgcatttttcaggcatggcccttctgcaaacgctcattgtctttttcatcatctatggattaattatgctaagaaatagacggtttattagtaaacagacaattttatctttgtttagaaccacgtcttctacagagcagcgtgtgaaaaagatctctgtgtttgaaatcatcattggggttttcggtattgtcttgatcagctcaggctattatatttcttctcagctttttagcggctcatatacgtccatgcttgagttattttcagcaatgatttatattctagcctctgtcattatcggtacctttcttttttataaaggctctgtttctttcattgccaatattgtacggaaaagaaaaaatggctatctcgccattcatgaagtcctgtctttgtcatctattatgttccgattaaaatcaaatgcactgcttttaacgattattacaaccgtatctgcacttgccatcgggttgttatctttaagctacatttcctattactcagcagaaaaaacggctgaacaacagattccatcacattttgttatgggctcagagaaagaagccgataccttcactcgtgcactttctgacaaacatattgcgtatgaaaaaaagcagttcaaggtcattcaagcggattttgatgcacataagatcatggattcggaattacaaagtttgaataagaatccaagagtcttgacactggctgtgatcagtgagaaaaatgcacctaatattcatgtagaaaacaacgaagtcatcttaagcggctacagtgatttattgaagaaattcatgccgattcaaagttcaggtgatgtgaaacttctcatcaagaagccgcttgatttaaaagtcattgatatgaagaaagattacatcatctcttacaaattcacttttggcggtctgcctgttgccgtcgtcagtcaaaatgtctttgagaagcttgaccagcagaaagatcctaaactgcagcttgagaatagtcaatatcatgcggtcaatataaaagatgataaaaatcttgaacaagccaatgatgtgtttacatctttaaaactaggtgacgacagcatgtctcaattagcttcagctcagcagcaaaagcaaacaatgggactgatgatgtttgtggttggatttttaggtctaagcttccttgtgacatcaggctgtattttatacttcaaacagatgaatgaaagtgaagaagaacaaagctcgtacacgatcttacgtaagcttggctttacagagaaagatctattaaaaggcattcgactcaaacagctatttaactttgggattccgctcatcatcggattgctgcacagctactttgcagttcagtctggctggtttttattcggcggtgaactgtggacaccaatgctcatcgtcatgtcgatttatacggttttatattctgtcttcggattcctatctgtccagtattacaaaaaggtcattaaagaatccttgtaatctattccccataggccgctgcctatggggatatgtttgtttatgatggagttgattcaaacttgtgcgatagaatatgatctcttgccgcataagctttgcgtttgacctcttctaggttcacaccaacaagctttccgcttcgtttcactgcttttccagccacatagacagaatcaacatttgaaggatgtgccgtttggacaaccgctccagccggatctgtcatcggcagaagattcatgcttgtccggtcgatcaggatgaaatcagcttcttttccaggtgtgagtgagccaattttatgatcaagctgtaatgcacgagccccattgatcgttgcagcttcaagcatttgatgagcagaaatcccaagttcaggttctggcatgattccctccatcagcaatgattgattttgaagcgcgcgctctgcctgaagtccgaatttcatttgagcaaacaaatctccgcctgtcgctgttaccacatctacaccgagcgttggaagaacaccttgttcaatcgcaagtcctgttacaggataaccgtgacccatcatcatctcaatttcaggtgtaatagatatggagcttccgctgtctgccagcatcttcatttgatccgcatcgattgcattgatatgcaccatgttgaggtcaggtccgagtaaccctgctttgtgaagccgctcaatcgaacgatcctccgctccccagttcccaaagccaatgtgcatactgcatagagcatctagagaccgggctgtttcgatttcaaatactgaagtctcccaagaggaaaactctggtccacgaatcgcaagccccatcgtcaagagctgatctgatgattgaaaatgcgcttttttcacgcgtgctgcgtcctccatattggtgagcgtgctctccctatcccaatactcagcatctccagaagagccaaaagcaaaaacagctcgaatgcctgcatcttttaatcctccgatcagctcttctgtatgatccattgaattgatcatcgtccagtctaaacatgtggtcactcctgcatctaacgcctctaatgcccctaaataatttgcgattcgatcatcggatgggcgtctcatcgcaccatagttaccataatagattttgctcaaatatgtctgcaaagaccaatctgtgcctatgcctctgatgacagactgccacacatgacgatgtgtatccacaagccctggcatgatcaccatatcggacgcatcgacaatgtcagcatcatttgcttcaatgaaaggtccgacctctaaaatgtgtgtcccttcaattaataaatctcctttttctaaaaaacctaaagttggatcaagtgttaaaatcgctgcatctttaaacaatgttttcttcatccatatcccccttttcaaatgacgaggaagagttcccccaccctcactgtaattttaaaacataaaaggatcaaattagaagaaaagtgacttcaccaactgttttatgagctgatttttttgaaatagttgtagatacgttttaatttggcctcatgtttcccttttgggctttccatcatgccgaactcaaaaaacttcacaggtttgattccgacatattgtaagagggctcttttcattaacatcttgtgtgcattttgcaaaaagaataaagggtagttggttggcccttgcattgtcgatacacaaacagcactttttccttttaacagtccttctggaagcagcccgcctgtttgacgataagcaaaattcgcagcaaacatgcggtcaataaagccaatcagcatggctggcggccgcccccaccaaatgggataaacgaacacgattttatctgcccatttgatcttttcctgatacacccgaatgtcagggtccttatgcatatcacgcctttttttctcttcattaaaaatcagcacaggatcaaattcttctttgtataaatcgatgattttcacttcatgaacaagtggattttcttcactgcctttcataatttcttttaaaaaagcaccatttaaactattgtgatgagggtgagtataaataatgagtagattcatgtgttgtctccttttgttatcatttgataactaaatgatatacccctcttaattagttgtcaaatgataattgttttttgataataattttggtatgttacataggaggtgataaacatgaagcatccccatttcttcaaggaattcgtagcatttgcttctactttttcagagctaaaacatgccctgatgagcaaagtcaaaccggctgacctaacgaccttacaatacttaattctagagcagctagctgtcagcgaaccgcttacgcctagtgaaattgccgactgtcagcacatgtctcttccaaatgtcagcagagaactaaaaaaactgcacgagaaacaatttatagataaaaaggaagacaaagatgataagcgaaagcatgtgatcatgctgtctgacaaaggccgcgcttgtatgaacgaagctttccagcatatcgaagggatgctattagacagcctatcttcctcggatatagaacaaatggatgacatcgtacaagctctccgcctattaaatcaaacgattttcaaaaaatgacctcatgaggaaagcatgggagatacgctcatgcaaaggttgctaaacttcaaaatacaaaaaagcgcgggctctaatccgcccagacgcttctcgcttttttctctatgtacctttatacaatcaattgatacgcaatgtataacgcgacaagccagatcatgaccgctgaagctttattgatacggttcatccacttgccgtttgtatctaacttccctagcatcttccctaaaagcgcaagcccaataaaccataaccaggacacgatgatacaggcgagtgtaaatgccagtttttctgccccgctatattgaagcgaatttgttccaatcacaccaattgtatcaagaatggcgtggggatttaaaagtgaaactgaacaggcaaagacaatttgctttctcgcaggcataaattcctgcttctctttagcatctgttgatgagcttgtgttccacacggaccatcccatataaactaaaaaacaaaatccaatgatataaagaccgatttgcagtacaggaatggtgaacaccacaacagaaaccccaatgacagctaatgcaattaatagtgtgtcacaaagagcagcagtgataacgacaggtaaggcctgatataatcgcggctgaagcgctccttgctgaaacacaaatacattttgtgcgcccaatggtaaaatgagaccaaaggcaagcacaattccatgaatgatggcgatgaacatcttctaacattctccttttccagcaattcttacacattttatcatagaacatcatgaccgcttccagcggatttgattttccgtaaaaaaaagcgctggatgcttccatccaaacgcttttcgtttattcatcatgatccttttcgtgcaagctctctttctctcagctcgacacggcggattttcgctgaaggtgtttttggcagttcgtcaatgaattcaatttctcttgggtatttgtaaggtgctgttgtgtttttcacatgtgtctgcagctctttgatcagctcatcactttgtgctgatccatcacgcaggacgacatatgccttcacaattgatcctctgatttcatctggactagccacaaccgcacattctttgactgctgggtgtttgatcagtgcatcttctacttcaaacggcccaatggtatagcctgagctgacgatgatatcatctctgcggctttcaaaccagaagtacccatcttcgtcttttttcgcgcggtcaccggtaataaagtaatttccgcggcgctgcgcttttgtacgctcttcatctttgtagtattccttaaataacgccggcgtttcgagatggaccgcaatgtcaccaacttctccaggagcgcatacgctaccgtcctcatcaatgatctcgacttcgttgccaggtgttggttttcccatactgcctggcttgatgtccattccttttagcacccctacgagcagtgtgctttctgtttggccatagccatctcgtacttctatatcaaaatgctttttgaatgtatcaatgacttcacggttcaacggctctcccgcagaaacggcactatgcagctttggcagctcgtactgactcaagtcatctactttcgccataaaacgatattctgtcggcgtacagcataggacattgatttcatttttttgaagcagctctaagtacgtatttggattgaatttccctccgtatacaaagccttctgcgccacttcctaacacagataagagagggctccacacccatttttgccagcctggccctgctgtcgcccatactttatctccctcattaatagagagccatgctttggcagctgtgcgtaaatgtgcatacgcccatccgtgtgtatgaacaaccccttttggatgacctgtcgtaccagatgtataggataagaacgccatgtctgtacgtgttgttggagccatttgcagctcacttgattgttgatccttttgcgctagaatatttgtccagccatgatcgttttcaccgattgagaatgttttaaaatcgtttggctgattggttccgtcgaacgattgaatgaatgaagagtaaacaatcgctccctttgcttctgcatgttcaattcggtaatctaaatcttttgcacgcagcatttctgaacaaggaatgacgaccattcctgttttcaaaattgctaaataaatgctgtatgcctctagcatgcgcggcaccatcacaatgattttatcgccttttttaaagcctgcatttaataatacatgaccaattttatttgcttcttccactaaagctgcatacgtcacatgcgcttcgtggccatttccatcctgccagtgcagggccattttctccttgtcatgactgaacgcttcaatctcactgactaagttatattgttctggtgcaattaagtcttctcttttcatggtacagctccttttagcctctttctatgaaacgaaacatgtttcaatttacctattctaacactcataactgaaaaatgcttgaattaggacctactcctagtattatgccataatttttttcattcgtcttcttttttagaaatattcaaactatttttatgtacaaaaagaaaagagcgggaatgatcccgctcctaagccataactttttaattgtgtgtcttagaaagatccgccacccatatgttgttgagcgtaagatacaagacgcttagtgatttctccaccaactgatccgttagcgcgagatgttgtttctgcaccaaggtttacaccgaattcagaagcgatttcgtacttcatttggtcgattgcttgtgcagcgcctggtactagtaattggttagaactgctttgtctgttttgttgagccatgtgttctcacctccttgtgaatatagaatgtgtagaaacacatgacttcatgcgattgattttatggtaattattatgaaatttttgttttagaataaatcagcgaattcgtctgccgctttcttctcatttgtgacgatgatcgtttccatttgatccactgcctcgtcgagcatcggctcgaaatcagcaaagctttcgtagcgttctactttctcaagctttggttttgttttaggagatggcggcgtaaagatcgtgcagcaatcctcgaaaggctgaatacttgtctcgtaagtgccaattcgtctcgcttcatcaataatgtcatttttatcaacagcaatgagcggtcgaatgattggtgtattggtcacatggttaatcgcatacatgctttccagtgtctgacttgcgacttgtccaaggctttcaccagtaataatcgcaagagcatcacgcttcgctcttattttatcagctattttcagcatcattcttcttgttgatgtcatcgtatagttttcaggtacttgtttgtgaatcagctcttgaatttttgtaaaaggaacgatgtgaagcttcacttcgcctccatatgctgctaagcattctgtaagatcaatgaccttttgcttggcacgttcacttgtatatggggggctaaagaaatgtacagcctcaatttgaatcccgcgtttcatcgcttgatagccggcaactgggctgtcaaagccgcctgaaagcatgagcatcgctcttccgcttgaaccaacgggcaggccgccagcacccttgacatctttaaatgtaatatacgtcgcatgttctcttatttcaatgcgcaaatgtacatccggctgtttgacattgaccgttaagttttccgtattcttcagcacatgtccgccaatttcgcggttcatttcatttgaatcaagttcaaattgtttataagagcgtttcgttgagaccttaaatgtatttccttgttcatatacttcctgtaccgctgtgagtgacgcttctttgatggcatcgagatttgtctcacatttcaccgcaagactaaagctttgtatgccaaatacacctttaagctgttctgaaatcggttcagggtcttctccgttcagcatgatcgtgatgcggtctctgtcagatgcatactttaatgcttcaaagtctttcaatacaaaccggatatgctgccttagtttttcaataaatttctttctattcttcccttttgttgaaatctcaccaaaacggactaaaatatgatcatatttcatgctgttatctcattccttttagtttttttacactttgtgcgatcgatgtgatgatttgcggcgctagctctggtccttgtccaaatgtcaaactgattctcatactgcttttggccacttcttctgctttccccatcgctagcagcacacggcttggctcttttttcttggctgagcaggcagaggttgtcgagacatacatgccttctttttcaagcatatggagaagaacctcgatttgaatacctggcactgaaaaattcacaatgtgcggcgcactttgcgtcagcggtgtgttgatgacaataccttctatttctccaagctgtttttgcagctgcgtttttaagttaagcatttcatcatgataatttttcagccgttcgaatgattgtttcatggcttttgctaagctgacagcaccagcagggttttcagtacctgaccgtagtcctaattcctgctcccctcctgtgatgaaaggggcaagcacaacatctttttttaaaaagagcgctcctgtcccttttaagccatgaattttgtggccagatatcgtcaaaagatccacatccagctgtttattaagtgctactctgcacattccctggaccccgtcgacatgaaaaagggcattttcggcatgctcacgaatgatgccagcagcttcttcaatcggctggatggcacccgtttcgttattgacatgcatcatgctgaccagtactgtatcagggcgtagcacttcttttaaatgattcatatcagcatggccatgctcatttacttgaatataggagatatcaaaaccaaataaagccttcagctgttcaaacgattcgatgacagaggggtgttcaattgctgttgtcacaatatgtttcccccggttcattttggctagagctgctcctttaatggcaatgttatttgcttctgttgcgccagaagtgaaaataatctcatattgtttcaatcctgtatagtgaagcatttgttttctcgtttcacttagcagccggctggcatcaattccgagctgatgaagcgaagacggattaccaaaaaaacgctcactcacttgctgatatacttgtaaaacctctggataaggcttggttgttgcactattatcaagatagatcatattgtaactccttacaaaaagcttaaaaaataaatgcatttatatgttaccataatgaagtcagacagagaattttctgaaaatggcagttgacaacttttcattttcactatatcatccatagtgcaattgtcacacgatcatccaaattgtcagaatattttaatttgacacactacactgattaaggaggaactattttgaaaaatagtttaagtataaaagagacgctagccattggtctaatgctttttgcattattctttggcgcaggaaatatgattttcccacctgttcttggacaatatgcgggtgagaatgtatggcttgccatcggtggatttttactcacaggagtaggtcttccgcttctaggggtgattgcagtcgcccttacaggtaccggtgcaaaaggccttgcggataaagcgcacccaaaattcgggaccatcttcaccgttattctgtatttatccatcggaccatttttcgctattccgcgaactggtacggtttcatacgagataggattagctccatttctgtcaggggcacagtccacttcatgggtaccactattcatctttaccgttgtgtttttcactatttcatacctgcttgctttaaatccttcaaagctggttgatcgaattggtaaaattttgacaccgatcttattaactgttattgccattattgtcattaaagccattgctacgccaatgggaatgatcggtgctcctgatgcaacatatgaagcaaacccgctcttcactggatttttagaaggctataaaacaatggatgctcttgcttctatcgtatttgggatcgtcgtggtgacggctgttaaggaaagaggcatcacggagcgtaaatctcttgcagcggcttgtattaaagcaggactcgtggcagctgttgggctggcattggtgtacatttcacttgcttttgtgggtgcttcaagtcccgatgcgacgggaatggttggagcaaatgacggcggcaaactgctttcactttctgccaactttttattcggttctgctggaaacattgtacttggcgcagccattttattcgcttgtttaacgactagtgttggacttatttcatcctgtggagaatatttttcaaagctcatccctagcctttcttatcgcacagtcgttctaattgtttctttatttagtacactggttgcaaaccttggtttggcacaaattatctctctatctgttccagttcttgtgacaatctatccactggcaattgtcattattttattgtcattccttgatcgctggattaacggaagaagactcatttatatcgtatctcttatctttactggtttctttgccatcattgatggattattagctgccaaagtgaacctcggtgacttgcctgacatcttagattcaatcgtaccgttttacgatttaggcattggctggatcttaccagctattatcggtgctgtggttggtttacttatttcgatgtttaccagcccgcccaaacagctcgcctcatagtcataaaccgaaacatccccttcttcattggaaggggatgttttttattgttctccatatactaaaatagaaaaattcatgacttttgtacgaaaacacatgttgacatcaggcgtacatcctttataattagtgaatgttaatgatgaacggttacttagcaactaattaacagaatatttcaacataataatggaggctttaaatgcaatgaaggcaactttgtcgacgaaagatacagttattatcggttttatgttatttgctctattcttcggcgccggaaatatgatttatccaccagagcttgggcaatatgctgggcaaaatgtgtggaaagcaatgggcggatttttattaacaggtgtcggtttacctcttctagggattattgcgatcgctttaacaggtcgagatgcgaaaggattagctgataaagctcacccagcttttggaacagcgtttaccgtcattttatatttatctattgggccgcttttcgctattcctcgtacaggaacggtttcatatgaaattggtgcattaccctttttagcaggtgtaccagcttggctctcacttcttttattcacacttgtcttttttggtattacatattatcttgctctaaatccaacgaagattgtggatcgtgtagggaaagtgttaacaccaattaaatttacgattatttttattattattgtcaaagccattttaacgccgatgggcgccgttggcacacctgatgtatcctatagcagcggatcatttttcaaaggatttctagagggctataaaacaatggatgctcttgcttctattgtgtttggggttgttgtcatcaacgccattaaaggacgcggtgtgacaagtaaaaaggcactgacttctgcttgtatcaaagcgggtctgattgcagcttgcggattaacatttgtttatctatctcttgcttatttaggcgcttcaagtacacacgccattggttttgttggagatggcagtaaaatcttggctcagtcttctcaattcctatttggcagtttaggaaatattgtgttgggtgccgcgattacggttgcttgtttaacaacaagtatcggtctcgttacatcatgcggagagtatttctcaaatttattacctaaactttcttataaaatggtcgtaacactagtgacattatttagttttatcatttcaaattttggacttgctcacattatcgctttctctgtaccggttttaactgcgatttatccgctagcgattgtcatcattgtgttatcgctggcagataaatggcttggtcaaagaagacctgtttatgtccttactttgattttaactggctgcgtcagtttgtttgacggcttagtagcagcgaaactcccgattggaccagtggaggatctctttcaaacgatattacctttatatgaccttggtattggctgggttgttcctgctattttcggagtggtcattgggttcgttctttctcttttcacttcttctgcttcccaaaagcgggagaaacaagcatcttaacagaaaaaagctgaagtcctgtaaatggacttcagcttttttttattggtgctgatactctttttcttgctgagctaacagcttctgaacggctccgggtgatgctttttcaacagccgctgctgctacatcaaatgatccgttgtaatcgtaggcatagaatcttcgttctgcctcttttagttgttctgaaagaatatggttttggcttctaaaacgattgccgtattgaatgattcgttcaatttggtccactttactgagcatttcttctgtctcatccgcaacatttctgactgtgtcagaggcttcttttaattgttgattcactgccggcatgttgagcggcaggttttccagctgctcatgcacttgctggatcatctcctgcgctttttcagcccgctctttcatctcagcaggtacacctgggatattgcttttatgcagctggcggactgtatctgtcagcatggttttgagctcagccagtgtttctctcgcttgtaattcttcttttcttaatgattgtagatgacctttaaatgtgtcatgcaatgcttttgcatcatcgataaaggtctccagctgattgatttcatccattaataatgaatatgccacgtggtcacgatcaagcttctcgcggatttgtttcatcagcttttcaatttcttctaaacgtttttcgaatgctttctgttgatcgagctctcctgctgtcagcttgtagctttctttcacaagagccgtttctgcctttgtttgtgtgtgatcttgttcaagcttctcgaatgcttctgtgagctcaggcattttgcttttgatttcctgacctgcttctacttccgcctccagctgatcatacagcgtctcaatcgcatcattgatcatttgcagaatgcttgatgcctcttctaaattgagttcatcaatgagcaatttttccgctctcgcaagctgtttgtttaaagtctccagctctttcgtgatctggatatgctccagcttgtagcctttttctgtcatttcttgatatccgtctttcagcttcgtcagctgacctggtacggtttgtttgcagtctgcaataagctttggtacatcattgatatatagttgaagctggtcgagtctgcggtcttgctcaagcaaaatctttcttgccttcatgtagtttccgttttctgtttcttcctcgtactgcttgatcccttcccaggcctcatctaagtcctgctccattttgtcataaagggtgccatataaatggctgtacgcaagcagattttttcgaactgtttgatattgctctttgaccttttcaatgtccttgcgattttgctcctcgcttgtgacaaggtctgcaatttcttttaaaatgtcttcaatgttcgaatcagcagcactcagcaagtcctcaatgtgcgtaagaacctgcttggctttggagaatcgatatttatcagaatactcttctgcatcatataatagctcctctacctttggaagatgggctgtgacgatatcgtcccactctgcacgccatctttcaaaaaattgctctgtttctccggtcatttttaaatgtttgatttttgaaatttcttctacaattgatctgtttaaaatttcaattttccatgcttccaatcggtcaatctctttatatatattttttcgcaggaaataaccgactgaaaacaaagcaagcaaaatgacaattaaaccgatgataaactccataatgagcccccttgttgtgatctaagtgatgtcagggtaaaagtgtcccgagtagacctgagaaccctttcgtgtccgctttgcatttgtctttttataaacaggatcgtatgttttccaataccatccattcacggttttatgtatgtttttcaagaaagtatttgagcgctttctatcatttgatcacacgtatccatgtgatctgcttttatgtatgcggaagctgtcgttttcattgttattatgataccatgtaaccagcatttttggtcatgatttttcattattttcgctgataaacatcacgtttttcaaaatatcgacaagaggtgacgacatgctgaagcaggatgcacatctacatacaccgttttgcccgcacggctcgcttgattcatttcattcttatattgaaaaagccatcaaaaagggatttgattccataacctttaccgagcatgcccctctgcctccatcgtttcgagatccaacaccagagcaggatagtgccatgaagctccaagaacttgactcgtatataacgaaattggatcagctgaaacaggaatacaaaggccaattaatagtaaaaactgggcttgaggttgactatatcaaagagtatgaagaggaaacaagtgcctttttagactgctatggtccagaactagacgatagcattttatctgttcactttcttcctgctggcgatgattatatttgccttgattttgacgagcatgccttcaagcagctaataagcgcctatggcagcatcgaacaggtctatcaaagctactatgaccaaattcattcttctattctatcatctttaggtcgctataagccaaagagaatcggtcatatcacccttgtgcagaaattcaaacagcttttcccatttgagatgccgcctgaactttgtcaaaaggtcaccctttgtcttgaagaaacggcaaaaaaaggcatgtccttagattttaatacatcaggtcttcgtaaaacatatgccagaagtatctatttagatcaatggatgattgatcttgcaaaacagaaaaaaattccgctcatattcgggtctgatgcccatcaagcggaagatctcggatatgcttatgatcaattcgaagacatcatgagttttaagtgagaatctaatgccggcttttttggttctagtaaatgatgaagcgagcggcttagttctttaaaatacatttgatagaaataaggctcatttggattcaaataaagcacctccgttaaatattgcggctgtaaatagggcatcatgagtagtgatttcagttgaatcataaacgatgagagtgagagctgctcacaaatcacatgggtgtttttccctttttcaataatgagctgaaacaaatatttttcttttgttaaataggtcgacataatttctctaatgagcgtcgaatcaatcgtcacctctcgataaacgaaacgggttaattgacggtgcttgtgctgataagataaaatatcaaaaaccacatgaagtaaacattcttttgcgtgacgagtttccatgtgatggatatgtgattcaatcatgtgaatatagccttcataaaaatcggatacaagctgctcaagcagccctccttttccttgaaagtaataagatatgtgggcaacgttgacgtttgcttccttcgcaatctcacggacagaggttccagaaaatcctttttggttaaaaagtctgatggaagcttcaataatacggtcttttgtttgcacggttgttgatgttttcatccgctcacccctcttcatgtgtacatacttcaagatgaaggcggaagttccttttacaattgctcgacaaatcccacatgcgagacgcaagttatgtatttttgagatagaaagtaggagattttcatgtttcatgtcgaaaaacagtctggcgatccatcaaaagactatcaattgcttgttaaacaggtagaagccattacagatggtgagcctgatctgattgccaatttggcaaatgctgcggcgctattgtatcattcactcccagaggtcaattgggctggattttatttggctaaagggggcgagcttgtgctcggaccgtttaacggactgcctgcatgtgtgcgcatcccgtctggaaaaggcgtttgcggtactgcgtttgcaacaggtgaagtccagcgtatcgctgatgtgcatgcattccctggacatatcgcatgtgatgcagcatcgcaatctgaaattgtcgttccgctcaaggtaaatggacagatcattggggtactcgacattgacagccccgtgaaagaccgtttcagtgaaatagatgaaacctacttaattcaatttaccgaggtgctccaaaaggcgttatccacctctacaaatgcgtaatcttacaaaaaagcaggcatattgtctgcttttttatttttcttcgcagacgcgaagcatcgccattgcctctaaataggttgacttctcctatccagcgtcatataatagagtttgtgtgaaatatggcagcctttttgttcggcttttttgtatcattttgttccttctatatgaaggtgcatcttgtaactccctgctgctggagcgaggatgcatgaaaacataatgacggaaaagacaaagaacagacggtttttatttttcacaaataaaaacaaataaggaggagtcacattatggctcgctatacaggtccaagttggaagatttcccgccgtttaggcatttcattaagcggaacaggtaaggaacttgaaaaacgcccttacgctccaggcccacatggtccaggacaacgcaaaaaactatctgaatacggtttacaattacaagagaagcaaaagcttcgtcacatgtacggtgtcaacgaacgtcaattccgtacactatttgacaaagctgctaaacttcctggtaaacaaggtgaaaacttcatgattcttcttgaaactcgccttgacaacctagtataccgtcttggccttgctcgtactcgccgccaagctcgtcagctagtcaaccatggtcacatccttgttgatggaagccgtgtagacatcccatctttctctgtgaaaccaggtcaaacgattgctcttcgtgagaaatctcaaaaccttgcagttgtgaaagaatcagttgaagtaaacaacttcgttcctgaatatctttctttcgatgctgaaaagcttgaaggaactttcactcgtcttccagagcgttctgaattagcgcctgaaatcagcgaacaactaatcgttgagttctactctcgttaatttcattactctcttaaagagagatcaaacaaaccctagagaccttgattgttcaaggtggtctagggttttttgtttgtattctcgtatgaacaaatgaatttaaaacatataatgggaaacagactatgcacaagacgagcaccgggcaagacttccaagaaacggctgaaaaaagatattcaaatgaaaaggtccttttgagtgcttctataagcatctctaaacatttaagttagtctaattttttaataacaatagaagcgttcacgtttgtttgagtccctcctgctagggtttgaagagtaactgctgctgcggaagtatggtttacaagagtaagcgtgtcacccgctgctagagcgaggattgcctgaccgttattctgttgagtaccagctcctgacccataaactgtgttcgtcacaggagctccatttacaaatagggtgaattgatttggctctacgccagaaactgaaaaagtaacctcatagtttcctggattggtcactataatttgagaagttccaggggcatgtgtaataccaggagtagtaattccagttgagtcaaaaatcaccggggcttctaaagctactgtttgagcacttagattgtatacatatgcaaattcagctagccctgcacctgtgactcccgtggctcctgttggaccggtcgctccggtatctcctgtagcccctgtcggaccagtggctccgatatctcccgtggcacccgttggaccagtggctccgatatctcccgtggctcctgttactcccgttggaccggtcgctccggtatctcctgcggcaccggttactcccgtcggaccggtcgctccggtatctcctgcggcacctgtgacccccgttggaccggttgctccggtatctcccgtggctcctgttactcccgttggaccggtcgctccggtatctcctgcggcacctgtgacccccgttggaccggttgctccggtatctcctgcggcacctgttactcccgtcggaccggtcgctccggtatctcccgtggctcctgttactcccgttggaccggtcgctccggtatctcctgcggcacctgtgacccccgttggaccggtcgctccggtatctcctgcggctcctgttactcccgttggaccggtcgctccggtatctcccgtggctcctgttactcccgttggaccggtcgctccggtatctcctgcggctcctgttactcccgttggaccggttgctccggtatctcctgcggcacctgtgacccccgttggaccggtcgctccggtatctcctgcggcacctgtgacccccgttggaccggttgctcctgcggctcccgctggaccagtcgctccgatatctcctgcggcacctgttactcccgttggaccagtcgctccggtatctcccgtggctcctgttactcccgttggaccagtcgctccgatatctcctgcggcacctgttactcccgttggaccggttgctcctgcggctcccgctggaccggtcgctccggtatctcctgttactcccgttggaccgatggctcctgcagctccttgaacccctcgtaatccccgtggccctcgtcgccctacaattaattttgtatgacaaatgatgcaacagtttgattttgatagtttatgtttacaataagggcattttttatacttatcacaacccatcagttgttcatctcctttatcattattcatatgttacatccgtaaataggtgcagataagtaaaacgtacaaagaataaaaagataatcgtagaataaacataatttgctagagtcttccaaaagtcttttggttgtaaaaatttgattgtattttgcgctaaatttgtctatggttttttcatgatgactagccagtctcaagaagctattcaaaaccatataatctatcatgaaaaaaatcccctagaattccagaggatttttttgttccatggttctctcaagtattattaagcgtataacgatatcttttattttaccatccaattactaatcaattgatctgttgtcatgacagtagcaaattcatcatgcagtgttgcaagtgatagccgatgaatcatttcgggatcataatatgtaccgttttgatctgttagtccaaaggcggcaactgcatctgagataaggtacgtatcaaagcctagattgccgctcattcttgttgtcgttgacacgcagtgaggggttgtcaatcctgtgatcacgaccgtgttaatatggtttgaccttaactgttcctccaagtttgtgccaataaagctgctgttgactttctttcgtatcaccgtttcttcctctagcggtttggcgatatctttgaagagatgcccttcatttgccggatgaaataaggagtccggcttgtcagatgtatgctgcatatgaatcactgtccagcctttttctctccaaaacgtcaataaacgactgatatttttctctgcatctagattatttcgttctccccatttttcatgctcgaacgccttctgtacatccacaatgatcaaagccttttgattcttttgcacaaacgcccacctccgtagattctcatttactacatgtagtgtaaggaatggtgatccatttgtacatgcttttaatgatgttttgcctatttttgcatcaaaaaaacaaaccacacactggcaacgatgtaatagataccaatgatcgatgtacagttggacatcacctcgcctatttgaactgatttaacaaacttcatccagatgaaatagatgaggagaaatgagcacggataataagggaaatatcctaaaaaatattgcttgagtttttgtgtcatcattttacctccattataaccttctttcatcatctagcagctgtcatatgtccgatgacatcaaaaaaagacagcacaagtcgctgtcttctttcattttttaattcgtattctgtcccccgccattcagtccttctttgatatagcctttgacttggcttgaagctaatagaccgatgtgaccaaccccgtgaatgaggacgtttcttgcgccaattaaacgcgaaaggctgttgacaacaatcagatcggctgagctatagacagatgtatagagaattttttgatttggatcggtgcctggtaatgctctgagtgaaacgagtccattcgctccaccaagtgtgacgacgttttctattttatcgccgccgtctagattcttaatatagtataacgtgttcgccccgcccatactatgcgccacaatatctacttttttggcacccgttttgtctagcacatctttgacgaatctggataaacgcggaccattgttgcggttattacctgttttgtctatgaaatcgatagcaaataattggtttcgatcccatccttgtgataccaagtaacttttaatcgaagcaaagttataagacgcaccgcccatgccatgtaccatcacaaccggattatgctcagccgctttgatctcttttggctggatgaaggccattgaacctatcactaatgcaagtgcaacaagaatttgcaaactctttttcttaaaacgaatcactttcattcccccttattcatcttattcgaactctattttatataagaaaaatatgtcagaaaagtgaacaaggcactgtttgttcaatcaatttatagaaaataaataatgaaaaagcacctttgactttctcaacgccaatgccaaaagactagacaaagtctctttgaacagtctattagactcttcaaagagcactcatctctcattttgcataaaaaaagcagccggttatcgcggccggctgcccatcgttcttatttgtaattcacaaggaagtatttctttttccctcttcttaagacagtaaattggttttcaattcggtcttcagctgaaaggacgtagtctttatcggtttgtctctctccgttgatggaaactgcaccatttgtgatgtcttcacgtgcttgacgttttgatggagacagctttgattcaacaaggacatcgacaagtgttaattcttctgtgctgcttttctccattgatggaacatctttaaagcctactttgacttcttcggctgaaagagatttgatctcgcctttgaatagcgcatttgagatgttgacagcctgttctagtgattcacggccatgtacaagtgtcgtgacttcctctgctagacggcgctgtgcttcacgcttttcaggtgctgtttgcactttttcttcgtacgatgcgatctcttctttcgataagaacgtaaagtattttaagtatttcacgacgtcacggtcatctgtgttgatccagaattggtagaactcataaggagacgtcttttctttatctaaccagatggcgccgccttctgttttaccaaacttcgtgccatctgctttagtgacaagcggcatcgttagaccgaatgcttttgccccttctgcttcagacttacggatcagctcaagtccagatgtgatatttccccactggtcgcttccaccgatttgcagcttacagttttcatttctgtaaaggtttacgaaatctaaagattgcaggatgacatagctgaactctgtgtacgaaatccctgtctcaatccgtgagctgacgatatcttttgccagcatgaagttcacaccgaagttctttccaatatcacgaaggaacgtgatgacattcatttggctgatccagtcgtagttattcacgataacggctgggttctcggctgcttcaaaatcaagaaattgtgacagctgtcctttaattttctctgtccattgttctacgatttctgcagggtttagtgaacgctctgcttttttgaagctaggatcgccgattagtccagtcgcgccgccaacaagggcaatcgggtgatggcccgcttcctggaatctgcgtaatgttaaaattggcaatagatgaccaatgtgcaagctgtcagctgtcggatcaaagccggagtaaagcttgattttttcttctgctaataattttgttaaaccttcttcatctgtttgctgctgaattaatcctctgaacgataactcttccatcaattgactcatatccaattctcctttttttacaattcaacataaaaaacgccccttcgaatgaacgaagggacgatatatatcgcggtaccaccctgcttaaaagacaacaaatcacgtcttttcacttacactgataacggacagatccgttctttcactaatcagggcagcatgcatgctccttttcgtaaaagcggttcgtgagggtaattcgaatacctctttgtactgactcgcaccagccgtcagctctcttggacagggaaagataattctactgaatctcagtcaaaacctttacatattcaactaatgtcattttaaacatacttttggtatcaagtcaactgatgaaaaaaattaatcttccattgtcgataggtcgccagccggtaaattcagctcccacgcctttagcacacgtctcataatttttccgcttcgcgttttaggtagtttgtctttaaactcaatttctctcggtgccgcatgtgcagcgagtccttttttcacaaacgtacgaatctcttctttcagctcatctgtcggctcatatccacttctgagcgcaatgaatgctttaataatttcaccgcggactggatctggttttccaatgacaccagcctctgcaatggccggatgttcgaccagcttactttccacctcaaaaggaccaacccgctctcctgatgtcatgatcacatcatcgacacgtccctggaaccaaaagtatccgtcttcgtccatataagctgaatctcctgaaacataccaatctcccggcataaagtaagattcatatttttcaggattgttccagatcgtatgcatcatagacggccagccttttttgatggcgaggttgcccatccggtatggcggaagttcatttccggcattatcgacaatcgccgcttctacgcctggaatcggtttccccattgaacctggtttgatgtccatgcatggataattacaaatcagctgtgcaccggtttcagtcatccaccaagtgtcatgaattcgtttgccaaatacagcgtctccccatcggatgacttctggatttagaggctcacctacacttaacacatgacggagcgagctgagatcatatttttgaatgaggtcatctcctgctcccatcagcattctaaaggcagtcggagcactgtaccaaacggtcacacctagtgattcaatggtttcataccacgtatcagggttaaacctgccgcctaaaatgacattcgtcgccccatttaaccatggtgaaaaaatgccgtacactgtgcctgttacccagcctgggtcagctgtacaccagtagacatcgtcttctttcagatcaagcacccacttaccggtctggtcttgctgcaccattgcgccatggacatgcagcacaccttttggcgtacctgtggaccctgacgtgtaatgaagcagaaagccgtctttttcatccatccattcaatctcaaggttctttgctgcctgctcaaacgcctcttcgtaatggattgtccgaacgccatcgacgtcttccttttcaccgccgacaatgatgacggattcaagcttcggaagctctgcaaacggaattcgttcaagcagatccggcgttgtcacaatgaccttcgcctcactattttctaaacggtctttgaccgctccttccataaatgcctcaaataacggaccaacgatcgcaccaattttgactgcgccaagcagaagaaaatagagctcaggtgatcttggcataaaaataaatacgcgatcccctttttgcacatgcgccttttctctgaatagatttcccgctttatttgtgttgattttcatatccctgaacgtatacttttcatcacgctgtgaatctttgtagtgaagcgccaccttgttcttacgaaacgagtccgcatgtctgtcaatcgcttcataggctgcatttatgtttcctgtttcataccacgagaagttttttcttgcttcctcccatgaaaattctttgtatgcctgctcataatcatttaaatgatagtccccttttactgatggcagcgtttccaatttcatcaaccagtccccctttgcatacgtttacaatgaccattatagtatagatgactttttttctcaatttttaaaaaacttatggtgaaaccgttttaattcttgcaagttttaagataaaatagagacgactcactagaatttgaggcggtggatacgtggagcatcctaaaacttattattcaaaaaccattgagcaagaaacaggttccatccttattgaaggtccggtacctgcaccagagcttgcgaactatacctttcatgaaggactgacggcatttcgcacgcctgaggaacagaaacaagcacttgttgaaatagcagaccttccagaaggacgtattatcattgcaagaatggatgagcttgtcgtaggctatgtcacgtatttgtatcctgatccgcttgagcgctggtcagagggtaacatggacaatttaatcgagcttggcgcgattgaggtcgctcctccatttagaggctgctcacttggcaagcatttacttgatgtgagcatgatggatgagcaaatggagaattatatcatcattacaactgaatattactggcattgggatttaaaggggacaaagaaaaacgtgtgggagtaccgcaaaatgatggagaaaatgatgaacgcaggcggtcttgtctggtttgcaacagacgagccagagattagctcacatccagccaattgtttaatggccagaatcgggaaaaatgtgagtcctgattcgattgagcgtttcgatcgtcttcgcttccatcaacgctttatgtattaacgttcaattcgtttttttggcaaaggggattggtaaacaatgatgattgaacaaattatggagcgtgatgtgatcacgctgcgaaaaaccgatacgattgaagaagccattcaaaaaatgagtgcacatcacattcggcatattccgatcgtatctgatcaaggttctgtcattggaatggtgacagatcgggatattaaaaatgccagtccaagtatatttgaaacagaaaaaagacagctctttattcagcgtcctgttgaagagatcatggtattagagacgatcactgctcatccgcttgatttcgttgaagagatttcaagtgtcttttttgaacacggaattggctgccttccagtggtgagacgaggcaagctcgtaggcattatcacaaagactgatttgcttcgtacgtttgtcagactgacaggtgcagatcagcctgggtcacacttagaggttgaagtggaccagatgacagaaggcctcgcagacattacggccattttaaaggagcagcatattcaaatgctgagtgtgctcgtgtatccgcatgcaaatgaagcctctaaagtgctcgtattccgccttcaaaccattcatgcagatcatgtgacgaagctgattcgtgcaaaaggctataaggtgctgtggccaatggagcagacgatcaaatgaaggaagcgacctttgttttttcaccctcttttcaaacgtaccaatttcaccaagaccatcccttcaatcagcttcgtgtctacttaacatatgatcttcttcaaaaaatgaaggcgttaacagatgatgagatcgtcgcaccgcgtatggcgacactggaggaattaaagctcgtccatacagccgattatattcaagctgtgcagcgggctagtgaaggaaagctctctacagcagagggtgaacgctacggccttggcacggaggatacaccgatgtttgcaggtatgcatgaggcagcttctctccttgttggcgggacattaacagccgttgaccaagtaatgatgggacactcgcagcatgcactcaatcttggcggcggacttcaccacgggtttaaaggacgtgcatctggcttttgtatatataatgacagctccgtggccattcaatatattcaaaagacatatggtgcaagaattttatatattgatacagatgcccatcatggagatggtgtacaattcagcttctatgacgacccagaggtctgtacggtctctattcatgaaacggggcgctacttgttccctggaactggacaagtacaggaaagaggtcacgataaaggctatggctacgcttataatattccgcttgatgcatttacagaagacgaatcgttcctcgaagcataccgaacagcagtgactgaaattgctgctttttttaaaccagatgtgattttgacgcaaaacggcgcggatgcacactactatgatccgttaacccatttatctgccaccatgaaaatatatgaggaaattcctagacttgcccatgagttagcgcatcaatattgtgatggcaaatggattgctgttggcggagggggatatgatatttggcgtgtcgttccaagggcatggagccggatttggcttgagatgaaaggcatcacaccgccagctgaactgcctcaggactgggttcaggcttggcataaacaatcgcctgtcagcctgccatcgacatggggagaccctgacgatttatatccaccgatcccaagaaaagcagaaatcacagaaaagaatgctcaaactgtagaaaaagcacttatgcctgtaagaagagaaaagaaaaatgcataagaaaagcaggcattcactaatgtgtaagcctgctttttcgttttattttgttgattgtctttcttcaattctgtgcggaagctcaacaatttgatcgtccacttgttctttgttcatcagctttgtcagcagtctcattgcgacagcgccaatatcataggtcggctgaacaactgttgtcagctgaggacgcaccatgagagaaagtctcgtgttatcaaagccaatcacttctaaatcctcaggaatcgatacgcctctatcttgtgctccgtgaatgacacctagcgccatttcatcggtagccgcaataacagctgtcggcttgtcagactgctcaagtaaatgagcaagtgattcaattccagaatcataggagtaatcgccttcagcgacgagcgcatcgtcaaatgcgatgcccgcttcttcaagcgcacgcttataacctgcaagctttctcatagagttaatcggttctgacattgggccagatacgaaggcaattcgcttatgtcctttctcaactaaaagctggactgaatcataaatcgcttgctcgtagttgatattgacagatggtgtttgagcctgctcttcaacagatgctgcaagaacaattggcacaggagagcgcttaaattcttcaacaagcacatctgtgatgtttccgcccataaagacaatcccatctacttgtttacctagcattgtatttaatagatgaagctctttatcggtattttgatctgagttacttaaaatgatgttgtacttatacatcgtggcgatatcttcaattccgcgagcaagctccgaatagaagatactagaaatatcagggatgatcaccccaactgttgtagtttttttacttgcaaggcctcgtgccacagcattcggacggtagccaagacgatcaatcgcttcaagtaccttttttcttgttgttggttttacattcggattaccattcactacgcgtgataccgttgccatacttacatttgcttctcttgctacatcatatattgtaacattattcacataaatcactccttcaaatacacttcatatctatagcattcaccaattggatagagacatgtcagatacgaggaaaataatatcctatttgtcattaaaacgatgaaaagagacacataatttttcaatctacatcaaaatgacattcttttatgaaattatacacgttttttcaccatatgaaaacgttccctttctttttataactaaattaaacaaactttaatgagcttgttacctgtaaattgaatcatatttcatgaaaaatcgccgtgaacgtcagctatgacaatgatcttagcagattctatcgaattttaaaaatgaaaacattgtgaacaagcacttttgaggcttgtaatgtgctcttttcctttcattcccaatctccatcatattttatccatagaaaaaccgccgggcagttatccggcggcttttctatctatgattacgcgtgaatgttgacaagtggtcttaacgcatctaaccatttttcgaattgaggaatgtccatttgctgcgctgagtcagatagagcaacagatggatctggatgcacttctgccatgacaccgtctgctccaatcgcaagagctgctttcgctgttggaaggagaagatctctacgtccagttgagtgcgtcacatcaacgaatactggtaaatgtgtctcttgtttcaagattggcactgcagagatatcaagtgtatttcttgtcgctgtttcgtatgtgcggataccgcgctcgcaaaggatgatttggtcatttccttgggcgatgatgtattcagctgcattgatgaattctgaaatagtcgctgcaagaccacgctttaaaagaactggtttcttcacagatccggctgcttttaatagctcgaagttttgcatgttccgtgcaccaatttggatgacatcgatatgctcaatcgcttcttcaatatgagcaggattgacgatttcactaatgacagcaagaccgtattcatccgctacacgctttagaatttttagaccgtctacaccaagtccttggaaatcgtatggacttgtgcgaggtttaaatgcacctccgcgaagtagttttagtccttgctgtttcgctgctgccgcaacttctgcgacttgctcgtagctttcaacagcacatggtccaacgatgaagcgctgtttcccatcaccgatcgcttctccattgatgttcacgattgtattttccgattttttcttacgagaaacaagaagtgctttgctgtggtcatcttcttgaagctctagacctgctttgaaaatctctttgaaaatatgctgaatcgttgagttttcgaatggtccatcatttgcttcaagaatttggttcagcattgtgcgctctctgacaggatcataacggttgacaccttgcgcttctttcgcctttccaatttcttttacaatgcttcctctttcattgatcagttttaagatttgaagatttagttcatctgcctgctgtctcaattgttctagttcattgttgctcatttttgtcatcctttcctctgcctgttctcgctttttattttttcattctctcatgatagggtttattataaacaaagatttcggaattgtcacgaaaattttctttattacccaaacgcttttaagcgataaagtattatgtgtaagattatagcatacttttggttgaagtaaacctttttttataaaaaaacgtcagcaattgctgacgtttcttctacagattatgttcaagcgcttcttttgtaatgcttgagtgagatgcatgccacttcacttttccaccgctaaagacgagtgcctggggactttcatgctttacccccgacttttcagtcacataggatgaaagctctcttgtgttttggatttgcaagaaataagtaggcacgtcttcatgtgcagacgcaaatgcttcaaactcttgaaaagccgcttggctgatcggacatgtcaaactgtgcttaaaaaagacaaacgtcccatcttgattcgttagttgatcaaactgttcttctgtttcaatgagttgttttgacatgatgttctccttcttcactccgagcagtgagagttagcctttagtcgattgttctactttttctttgacatctttgatgccatcttcaatttctgatttcgcttcttgtgctcgtacttttgcttcgtctgctacatctgaagcttcatttgctaggtcagctgctgcatcttctgcttcactttttacatgattagcttttccagctgcacgctcttttatgtctttcactttgtctaaaatctggtttgactgttctgctaccagttgggacaattcagacgttttatctttcgcaatcgtcacatattcagtgcctctttcttttgcatctgttgtgaggcgatctgttttttcttttaaaacattcgcttgggtgttcaaatcatcgcgaagctctttccctgacttcggtgctaaaaataaggctgttgttgcaccaacaattccaccaataagtgttccgatcaaaaagtctttgctattgattccgtctttgctcatgattattcctcctatgcgaaaatggtttatttttggtgctttcgttgtttccattttttataaatttcaagtgctgcgttactccagcttaccacatccgtgactttttcttgatttcgttcaacggatgaagaaactgcaccagctgcctgctttatgcttgtattaaattggttgatcgagccgccaattccctgcaccgcatccacaactgtgttgagttttgccgatttgtcttgaatatcttcagcaagctgattcgtcttatgtagcaactgtgtcgtctctgtggtgatcccttgcatctgaccttcaagaccttctaaagttgatgcaacattctttaatgtcagctgtaaggattttaatgttttggacaaatagatgacaagaatgaggaaagcaattgcgatcagtgcaacgcttagatatagaataataatcatctgatacctcctttgctgcgggcatatgcaattcattaccctctcgttgtatcattcaaacatcgcctagaatgaccgattgaataataattctacacttattcgctgattcctgtccacagcgaacgaaaaaaagcggcagatgttgacacatttagcccctttgtcacattttattcaaaataaaaaaagtgccgatcaaaacggcacttttcctttaagcatttatacagcgactttctcataagcacgcagatatttttgaatgtctcctgctcccataaagatcagaatcccatcttcgtgcgctttcagcacagatgtatcttcttccgcaatcaattgggcctgcgggattttttctcgtaaatcttcgatactcagcttcccaatgttttcacgggctgaaccgaaaatatcgcataggtatacatagtccgcttttttcagactgtcagcaaattcacttaagaattgctgtgtacgtgtgaaggtatgcggctggaagacagcgacaatatcacggtctggatatttttgacgtgctgcttcaatggtgacttcaatctccgttgggtgatgggcatagtcgtcaattaagacctgctcaccgaccactttttcattaaagcggcgtttcaccccgccaaatgtcattagtgcccctttgatgagctctacatcaatggcttcatagtgacataatgcaatcacagctaatgaattgaggacattatgatttccgtaggcaggaatgtagaaggtatcataaaacgtattgcgtacaaatacatcaaatgtagtgccttccgtgtttttcacaacattgcgtgcttggaaatcattttcttcattgaaaccgtagtacacaacaggtaccttcgcttgaatcttgggcagatgctcatcatcaccgcaagcgataatggcttttttcacttgaagcgccatgttttgaaacgcatcaaacacgtcgtcaatgtccgagaaataatcaggatgatcaaaatcaatattggtcatgatcgcatagtctggatgatagctgaggaagtgtctgcggtattcgcatgcttcaaatacaaaatactcgctgttttctttccccataccagatccatcaccgattaagtatgaagttggtttcgctgattgcatcacatgggcaagcagtcctgttgtcgacgttttaccatgagcaccagtaatcgcaacgtttgtgaatgaatccatgtattctccaaggaatttatggtaacgaatgacaggaatcccttcagaaagggcacgttcaatctcagggtgtgtatcaggaaatgcattacctgcaatcacggtcatccctggctgaatattatctgggtcaaatggaagaattttaatatttcgttcttctaatgctttttgtgtaaagatatgtttttcgatatccgatccttggacagtatacccagtatcatgaagaatttgggccagtggactcatacctgtcccttttattccaacaaaatgataaacagtcataattgtacctccaacaaacgtctatctgacttacagtatatgacgctcatttcaatttgcaacttgtgattttcgcctctagcggctcacagatcgcagctccaaataaagatttttttccgatcttcctattctaatcaatattaactatgattagtatccgacaactttcctatttctaacacctgctttcgctcattttatataaaaaagcgttctgacaggcatacgaaaagcgtccaattacaaaattgcacctatgtgctatcataccatgtttataaaaaaaatgaagtggtttgtttagatcagctgttctaagtcactcagtgtcataaggacttcccttggcttactgccttttgcaccagagatcatgccctcgcgttccatcatgtcgatcaatctggctgcacgattgtagccaattctaaatcttcgctgcaaactcgatgtactagcgctattctgctcaatcgcaaaacggcaggcatccataaacaattcgtcttcatctgtaatcgcagagccttggagcattaattcctcctgttcgaaaaggaacactggcttacgctgttttcttacatgtgccactacttgatcaatctcacggtctgatacaaagttcccttgcagcctcgtcggcttgccggagccattttctaagaaaagcatgtctccttttccgagaagcttttctgcacctgccatgtcaatgatcgttctagaatctacctgacttgagacagagaaagcaattcttgttgggatattggctttaatgagacctgtgatgacatcgacagaaggtctttgtgtcgcaatcaataaatgaatgccgcatgctcttgctttttgtgcgattcggcaaatgctttcttcgacttcatttggtgcgaccatcattaaatcagcgagctcatcgatcacaacgacaagataaggtagtttttcacccatttgtttttctttgacaagctcattgaatcgtttaatttctctcacgccagagtgtgcaaacagttcgtagcgcctttccatttcatccactacccatttcagagcggctgtcgctgtcttggcatcggtgatgacaggactcacgagatgcggaatgtgattatatggcgctaattcaaccattttagggtcgattaagagcatttttacttcatctggtgacgctttaaacattaagctcactaaaatggtattgatacagacactttttcctgaccctgttgctccagcaattaagccatgcggcattttttgcagatcaaccacaacaggctggccggatatatctaatccgagtgctgctgttaaaggtgatggattgtctctaaatgcactgcttctgatcatctctcgtaagaaaaccattttactgtgaaggttcggcacttcgatcccgatcgtgttctttcctggaatcggtgcttcgattcgaatatcttttgcggacaaactgagtttaatatcatctgataggttcgtgattttgttcactttgacacctggttctggatgtacttcaaaccttgtcacagaagggccttgcgtgacatgaaccacacttgctctgacattgaaatttttcagcgtggcattgagcagctctgcccgctctttcacccatgtcccgtcctcttctttttgagctggaggtacgtctaaaagggcgagacttgggaaaacatacccttgtgcatctgctgctttcttttgcccttgcacacgctgatcactttttaacatcatgacgttaaaaggaaccgttgaggtttgtccgcttgtacgttgcgtctgtggagctgcttgtttcggtttttcttccttgacttcatgcacttgttcttgcttttcttgctgctctatgacaggttctgctggttcagtagcggtctcatcgtctgctacttgttctattggcatcatttgatcttctactatttcagcttcttccaacaattggtcttcttgcagatcaagcttggcgactggctcagcttcttcaaatgctgccgctggcacctcttcttgatgatcttctatggaatcagcttctatttccgcgaccggttctgctgggatgtcttctgttacctcaacttcttctgccggcatgtctacttccatttcaattgcgggatgtgtgtcttctgctgtttcgaatgtcaacggttctatttcctccgtatgatctacaaactgatgtaccggctcgccttttatttcttcgtcatcgcttgagacatcctgttccggctcagcctctaccggctgttcttgataagcttcggcctcctgattatgtaagtcagcttcaatatggtcttgaggctcagaaaaggctggctctttttcctctgtttgaatgaaaggctcgtcatttaaacgctccatcgtcgattgaacgtgatcctgataagcgagttcctcttgcaaagtaagcggggtcacgtctgtttgcatgtccactctttcttctgctggggctgaaaccgtttcttccatacgattttctttccgtattgacggaatgttcatttgctgtctgacattccgtacacgctctgcctcttctgataacagggtgacacgctgcgctgtttctgctgctttcatttgaacaggagatgattcttctttcgcttctgttcgttttggacgcatatcctgatgatagccatagatcggtgatggaatttgctctgttttgaatggctttttattgatgtcaggctgcaccgtttgttttggctcataggtcttctgcttagcctttggcttgcttggctttgcgcgtcttctttcctgcttcactccgtcacgcagaggttcatctggaacgagcggaaagcggaagttgcctttcggatattcataatagacttttgtatcttcaatttttttatattctttatgctgttcaaaaactggctgcgttcgtgcagctggaccttcattatgtctcacagctttttcttctttcttttcttcttctcctaaaaatacactaaaaaatttatctaaccaactcatcatttatcactcactttaactccccttacgttttcttgggcgatttttagtataccattgctttttcatgcagaaaagcgagaaaagtgctgctctttgctatttgtgctgtctgtagatgaaaaaaagtcactaagtacgtacttagtgacttttggtataacacattcttcgctcctatgtgcccgtttatgggaggttacgctttaaagggttcgccagcttggtggcttccctctagaacaagaatccctttttcagcaggcgcgtctggaagatctagttcttttgcagaacaaatcattccgcttgatggaacacctcttagctcagcatctttaatgaccaaaccgcttggcatcaccgcaccaaccttcgcaaccacgacatattgcccttgatcaacgtttggcgcaccgcacacgatttgtaatgtttcatcgccaacatctacttggcaaatgtttaatttatctgcattcggatgcttttctttttcctttacataaccgacaacaaattttggtgatagatccacggtcaacgtttcacttacaccgttgcggtttaaaatttcgttgatatcttgaacaagtgtttcagatagcggtacagatccgttttcttcaattttcatgtaagtggatgcgttgaagatattaatacctgttgtttcttttgtttcttgattgaagattcttacgacatctccaaacctctcatgacctacttcttctctcgtcacatctttcaatgaaataagaagtgtgtcgcctacaccttctgcattataaaaaacgttcattcttcaaaattcccttctactgctgttttggtctgcttttagcaagaataaagatcggttcaagcttgccctcatcatataaaaatgacaatgcggtaatcggaaccgtgccgctggcgaagaagctcatcgacatctgtcctaaaatatcatagcctgattcattgcgaacatctgcaatgatgaatacatcttgatggggaacagaaatggccatatgtccttctattttttgcgcgtattcttgtaaaatcgattcatttaaaagtctgctggcatcatatccgtcattcgcacggaagaaataaaaccgattgcctgcaacttcatccattttcaccacagtttcaagtgagcggacattgaagcttgcagtttccctaattcgctcttttgtccagttttccttttgaagcattttctcatcaattaatctgtaggtgcttccaaggtcaagtgcgtagaagattctcgtttcagctgtatgctcatcaaaaactaggggaatgccatcacttgatgcctcaggaaaggaagtggaacgaatgacaggatagatctgcttttcttttcctgagatgtgctgcgcttcgcctttcatggcacttagcgcctctttcacatagtaaacgatctcatctaatgtttcatcaggctttacttcccactttgcaatgattggcgggagctctagtgtaatacctttacttgtttgtttatcttcaatacgaagcgtatccttttctcggtcaaactgatgtgaccagctgtcatttgtcagacggcttttgagttcgttcgcaagctgtcttgatgtcatttttgccatgatttagaccctcctttcattatttagaaagagaatctgttaaaaatgcttcaatctcttccttcgtcttacgatctttgctgacaaagcggttaatttcttgtccatttttaaaaactaaaaagcttggaatgccgtaaatttcccactctgcgcaagtgtcaatgaactgatctctatccacatagaagtactcaaattctgggtagtttgcttcaagctctggcaagaatggttcgataaaggtgcagtccgggcaccagtcagctgaaaatagcaatactgttaagtcttcttgaatcactttttgtaattcttcgtttgattcaatttttttcatgtttcattcctccagtttgtatggttaaatctccgaattgtatatagcctttctttctcatccattctgatactaccaaactaatcactgccgggccaacgatatgcaaaagagcgatcgccagaaaaacggatggatgaaatcccataacggtcagtgtcatgagctgtccaacgaggccgctcgttcccatacctgcccctgccgcattattgaccatcccaaagccaataataccaattggcgcgagaatgaggcccgcaatcgtcggcggaataaggataaggggatttttcacaatgttcggcagctgcaattttgacgtgccaatgccgacagcagcaagaccgccaaaacgattttctctaaagcctgcagcggcaaagccgaccatttgagcgcagcagccaatcgttgcagcaccagccgctgttccgcttaagtcaagcatgagcgcaagcgccgcacttgaaatcggtgagctgagggcaagtccaacaatggtcgctactagcatgcccatgatcagcggactttggtcagtcccccacatgatgagtctgccaagccctgtcatcatggcttcaatcccaggaccgatcaaagcggcggtgaaaaagccagtaataatggtgacaagcggcgttaaaataatatcaattcttgtctcaccactgaccagcttgccgagttccacaccaattaatgctgcgacaaagcttccagcaggtccaccaagctctgctcctgcagcacctgagacaacacttgcaaaaatgatcaaaggagatgcatgtaagcgatacgcaacggctacaccgattgctggtcccatgagccccatcgcaagtgttcccattttgatgatgagcggaagtgataacagaccgcctgctgtttttaaaatcagccctaccactaaggtagcaaatagacctaaagccatataagagagtgcatcaatgaaatacacttttggcgaaagggagatcccttttcttttcaaataagtcatcaacgtcgtcttcctgctttctcataggaaagacgaagagcctgtccttcccattatatgtagtattcttacgatgaaaaatagtctctaccatgaatatcataatcatattttttttgctttatcaagcacttcttgtgtaacatgaaaagaaacagggcaaacctttactaagtttgtacaaaaggaggagatcgttatgcaattaaccgtctatttagcaggagaaattcatagccagtggcgtgatgaaatcaaggagaaaagccaatcgttgaaactgccggtgacgtttgttggtccaatggagaatcatgaccgctcagatcacattggtgaggacattttaggtgagcagccgaatgccattttcaaagatgatgcggcttctgatttgaacaatttccgtactgagatcttattaaacaaggcagacgtcgtcattgcccgctttggtgagaaatataaacagtggaacacggcaatggatgcatctgctgccatcacaaaaggaaaacctctcattttgatccgcccaaaagaactgcaccatccgttaaaggaactatcaaacaaagcgaatatcactgtagaaaccgtgaaccaagcgatcaaggcgttatcttacgtgtttgaacagcaataaaaaaggtgaaactgcaaccttttttcctcttttcgaaacctttgcagacctggcaatgaatgcgaggttttgtctacatatacacactaaaggctgctctcatgaaagaggcagccttttctattacatttacacctgttgataaatagaatccactgtactttgatcacagtttttcaccaggcggacaattaattcttttgccgctgcgtaatcatccacatgcaatactgaatgacttgtatgaatgtagcgagcgcacaccccaatgacagcagaaggcacaccttggttggaaatatgcacacgtccagcgtccgtaccacccggtgatacgaagtattggtatggaatgctgtttgactcagcagtatcgagcacaaagtctctcatcccgcgatgcgtaatcatggttcgatcaaaaatacgcagaagtgctcctttaccaagctggccgaattgggttttgtcacctgtcacatcgtttgcagggcttgcatctaaagcaaagaacagatctggctgaatcatattcgcagctacttctgcccctctaagccctacttcttcttgaaccgttgcacctgaatacagatgacatgaaagaggttcgtcttttatttcttttaataattcaatcgcaagtccacagccatagcggttatcccaagccttcgctaaaatctttttaggattcgccataggggtaaagactgttgcaggcacgatttgctgtcctgggcgaatgccaagttcttttgcctcttcttcactgtctgccccaatatcaatgagcatgtctgatggtttcacaggtttgcttttttgttctggtgttagaagatgaggcggtgtactagagacgacaccaggaattggtccgtgaacggtatgaacgtcgacacgctgtgccagcatgacttgactccaccagccgccgagtgtttggaagcgtatcatcccgttcttcgtaatggatgaaaccatgaatcccacttcatccatatgaccagccaccatgattttaggtgcgttctctggtcccttgcgtaccccaaacacaccgccaagacgatcctgaatgagctcgtcagaatatttctcaagttcctttttcataaaagcacgcacatggtgctcattacctggagttccctgtaattctgttaaatttcggaaaagcgacaatgtttcttcattcattctacggtttacctcgtttctatgtaatgaccatatatattcctataaaaataacactcactttatactataagaattctttcggttttccaagtatctctccagaaattttgaatatgctttcaagtattcggattccttaacatcaatggacaagttttgtataatggaaaaaacagcaatacggaggtgcagcacgttgaagttaaaacatgttctgattggtgcgagtattggcgtagccgctgcaattgttgcaaagaaagtatttttccctacgtatatctcgtctgaaaaagcattaaaaattgtgaaatctgcttttaaacagcgcggcccgattgatggctcttggatttatactgtaccagaaccgtataccgtaaatggtgaaacgattgatgtgtacaaatctggcattactcgctcagcctttggcgagcttgaacagtacgaagtcatgattgatgccaaaacaggcatgatcgttgatgtcattgattctgtggcttgataaagaaagcttcgcaaaggcgtgtccttgcgaagcttcttttttatatggctttgatttttttgtacacaggatgccacatggcgtcctgtacagcctgaatgagatcctcaggcgtttcctctgcaataccttcatcgatcgctgcttgcgccacacggacagccactgtcgctgaaacagttcgaagctgatccacacttggcagcatcgctgcacccggctttccggcattgaccatgctggcaatcgcttcagcactcgcaacaaacatgctgtctgttataaggcgggctttagacacaatcgttccaagaccaagccctgggaacacaagggcattattcgcctgaccaatttcatatgtcacgccgccatattcgacaggatcaaatgggcttcccgttgtcacaagggcgcgtccttctgtccactcgatgagatcttcaggctttgcttctgaaaggggtgttgggttcgacatcggtaaaatggctgggcgctccacgtgtgacgccatttctttcacaatttcctctgtaaatgctcctcctaccgtcgaggtgccaattaagatggttggtttcgcctgtttgacgacctctaataaatcaatggaatgcttaggaccgttacgggcataatcctttacttcgtcagaacgtcttgcatatggcttttgaaatggatgaatgtcaggcgaatcatctgtaagcaatcctgttttatcaatacaccagaaatgatcatatgattcctcttctttgacaccttctcttacgagagcatcacggatctgctccgctatgccaatccctgccgtacccgctccgaaaatgacgattcggtgatctttcagcggaaccttcgaagcttttgcacatgccagaaccgcagcaagtgaaacagctccagtaccttgaatgtcatcattaaatgtacaaatacgttccttatatttttccaatatggctcgggcattttttgtcccaaagtcttcccagtgaaggagtgcatttggaaaggttgcgcgggcaagctctacatattgatcaatgaaccgatcataacgttctcctcgaacgcgagaatgctgatttccaacataaagcggatcattcaagagactttcctggttcgtcccggcatcaagcacaacggccagcacgcggctaggatcaatgcctgctgcggctgtataaacagcaagtttcccgactgaaatggcaataccgccaacaccccagtctccaatacctaaaatgccttctgcatctgtcgcaacgattaagtcaattgattcatcaacaccgtaagaggcaaaaatctcttccatgccttccaaatcatcaatcgataaataaagcccccttggctttcgatactcgtggctataacgctgaatggctgttccaacagtcggcgtgtagacaatcggcagcatctccgccaagtgctcatttagtaatttgtaaaaaagcacttcgtttctgtcatgaagtgatgttaaatacacatttttccccagttcatccggctgtgccttgaactgctcatatgcacgctttgcctgatcctctaatgttaaaaccttaggcggtagaaatccctttaaaccaagctcttcccgctcttccttagtaaatgcaacccctttgtttaaataagggacggacatgacttccatccctcttaatggtgtttcaatgacatcaccatgtacacgataaaattggttcacctgcactcttcctttcacaagttcattttgtcgttattttgtgtgaaaggcgaaaaaacatgcagatgatcttttatcttcctgtttctcttttaacttcatgtgtgatttgcccgtctttatcccactttacagcgcggtaaatcgcatcatgataaaacaagtaccacgcatttttttcttctgcaaatgcctgccatttttgcttagctggaatcgaagtcattgggtaatcatcataagccaagacccataatggatttttatgagcgtgtgttggcatgatatcagccaaatgaatcgctgtttcgccctgacttgtgagcgttaagatgctatggccattgctatgaccgcctgtatgatgcagcccaatgccttttgttacttcgatgctttcttcaaatggcaccacttgatctgctataggctcccagttttctttccaatatgtattttttgagcggatgttaggcgccctcatttcatcccattcgattttggatgtgatgatttttgcctgcggaaaaacagacacgagctcttctccctcacgttttgtcagcccgcttgcatgatcgaagtgaaggtgtgtcattaaaacgtaatcaatatcagctggttgcaggccgagtgccgctagcgattgttccaatttcgtctcttctgttacgccgtaattgcgtttttgtttatctgtcagcttccctgatccgatgccggaatccactaataaatgaagaccattccaccgaatgaggatcggatcacaccgcagttcaatttgattgcgatcgttcaccggatatttttttgaccataacggctttggcactacaccgaacatcgcaccgccgtccatgtgtgtatctcccccatttaaccagaacagttccatgtcacctattttcattgtctccattgctgtcatccctcctttttctatcgtagcaaatacagctgaaaatcgcatgcatcaatcttttcatgaaaaaagctgactgcaatttttctttgcagccagcttgatgtcacttgttaatctggaaattttacttctgatcgatagatgggttgtcccatagacgagaatttttcttcgtattcagtcatcacatttccttctaatccgtccttatgtaaatctaagcttacatacgttaaaagaaggccatatgcagaaaaactctttaaggaatattcaaataatccgcggttatctgttttgaaatgcaattcaccacctggacggagaatatgttcatatcgctctaaaaaggccttaaacgttaatctgcgcttttcatgccttgcttttggccacggatcagagaaattcaaatacacccgggcaatttcattttccgcaaacacatctgtcagcgtttcagcattgatgttcaaaagctttacattttcaacatctgtctctttgattttatctactgctgtcacaatgacacttttaaataattcaatgccaatatagttgatatcaggatgaagcttgcccattccagcgataaagctcccttttcctgtcccaacttcgatatggattggatgatcatttccaaacagctcatgccatttccctttatattgctcggggctagctaaggcaatatgagcattttcagctaagtaatcatccgcccatggtttatgtcgcattctcaatttgatacacctctattttctttacattttatcaagataccatgaaacataaagacccgcaagacagcatctttatgcacatatgaaaaagaccagcccttcgctctgagctggtctgccgcatgtataaattgggcgctgaatgcacagtttaaccacataaatgacacgcagaaaaggagcatacgtatgggattaaaccgtcaacatcagcttcaattaatcaaagatattttaaccgatcaccagttggattgctgcgggactgttgcagaatatgaacaggtgggacgtgtgattcaattaatgctggcaaaagaagaccttgatgccgacattcgtcaattattaacagatatttatgattacagccaaaagggcacttctgtcagttcaattaatgcacatatcgaggagcatcaatcgcatttgtcagagtgggtcgagaatattcctatgtcttaatggatgtttaaccgctttaagagtgcgctcagctccgcttgcacttcttgctgcgctttttcatttccttttcttttatgccacacgacaaacgatacggtttcagcgaggacgtaccaatccatgcgttttcgcaaattgtccgtcagcggagcaccgtacatcgagagccagctttcccagttctcttcttcaacataatggtataaaagtggtccaagatcaatggctgggtcagcaatcatcgccccatcccaatcgatcaagtaaagctgattttcatctgtcagcagccaattattatgattgaggtcacaatgacacacaaccttgtcctcaaattggactgcctccacatgcttctctaagtactggatggcacgtgtaatgtcttgtgaatcgatttgctcttttaatatggactgttttaaatgcttcaaaatggattctggatgtagagcatgcttctctaatcttttcagcatatcaagcaattctttagatgtatgaatttttcttagctgctctgctacaggacggtcattcatgtcctttggcttcagctctctgccgctcagccagtgctgcgcagtgatgacatccccattttccatccgttttgtccagacaagcttcggcacaatgccttcagctgacaaaaccgcaagaaacggtgacgtattgcgttttaaaaatagcttttggtcattgtgtgttgcgaagtacgcatctcccgtagcgcctccagcaggagagatgtgccattcgctacctaatatttgtcccaaccagttcatatcaattttcaacccatcatttcttaaaatattttaaatcttgcttttttagtcgacaaaattcagccgattgaagatcaattggctgtttcttttttatttatatgatcataaaaacaaaaaggacagctattgagaatgagatgctaaacaatagccgtcctatagattttatcgttaccttcttatactcgtcaagcaaaactagaaaatcaggacaagaaccttatgaaaaggaaggcttttttcatggtttttgactagggcattcacgagaagccatttaagcacgtaattttaaggagcgctcactcgccttcacaaagacaggtgttgcgccgatcacttctccatctgcatgaaataagatttttgcatctgcctccaagtacgcttcctcgtgctgatacagggtaacgcccttcattccaagatgctttcgaaacaccatcgcacttaaaaacaagagcactttgaatggattcaaatctgtgacaacgatcgtttgaaagcctggctgcctcgcgctcacttccggcgctgcttccagcccgcctccgtaataggggtgattgcatacaatcacaaaccacacttggcgaaagaccttcttctcattttcaataaacagcgcaaggtcaaacggcttaaaggaccataaagaatggagaaatgacagcgggtagataataaacccaagccccagccgtttcagccacttttttcctctgaaatgcactgttttccttagcacatgcgcatcaaacccagcaccgatatgattgagaaagagaacggattgcgggctttctgcatgatcttgaaaggagccgagagaaaatgttttggtgagcattctcttttgctttctcacttcttttaggacatcttgacgatggatgccgaggcccttcgccgcatcattccaatgaccggcgggaacaaagcttaactgcacatgatccatttcctttaagccattcaggacttcatgaatggtgccgtcaccgccaatgacaatcaggcgcttcagcctgtcatcttgcatggcgctaatttgtcttgccaatacttctgcatgaccttcatgctgggtgagaaacgatcgataagagatctccatcttttgtaattctttctctatgctcctccatgtacgaagtccttttccatgtcctgctgctggattaacgataaagtaccattcattcatatattagctccactcaggtctcatttttcgtgaccttccattatgcctttaatcgagccattcctgccttcttttgctgtctgattcaccataagcaagcaatgcctttgtcgccttaaattgctgatgctttgtcggcgcggtatttttccgctgcttttcaaaccaatcttccgccttcttcttatcgacaacctccatcccgtatggaacttccggtaagtcaatataagaggttctgctgatcaggatttttttcacaggaagatcgacaccgctttgctgtaagatctttgacacgacggtgccagagcgcagaaggcttgcgcaaggattcaaaacggactgaacagctttcccattcgcccgcttttcccaaaaacgttccttcgttccgatatatacgctgtcaggctctgcctctaagaaggataaacaaatcacttccagcggcgtaataagtactgaacataattccatctctgctttttgaatgagcagcaccggcttatacatcacaaaatatgaatccggaagctgcctagcaagcatacgcagcttttcatcataccgaatatgatgggagacggttgaaatgtgggaaatcgtcgagctcgcccattttaattgaacatcgtatagatgatccttaaaaaaatgaatgagcttcgtttcatcggtaggaacgtttgtaaagacaccttgctctatatctgtcggctcgttaaaaagactcaggtcccgttcctttttcatatcggcttctttttgctttctttttaaggagaatttctttctcttttcttcctcttgttcaggcacttgttcagagatttggtcaaatgaatgctgcgcctcctgttttgaagccttttttaactcgtcccacctttgctttttcaatcgaatgaattgattgatgtagtgatgcgggtcttgttcatatcgtgatatataatcttgaattttgataatttgcgccatctgctgctcactccaacttttagaatcatttatgtagtgcaaattgtttgattgcgtgataacgcggggtttctttcggacgtatttcaaatagagtcatacaagaaacctctatcacgtatggctctttgcgtaaaggcgcttgttctgcaaaagagtgatccgcgttccattttcgcgcaatcgtcatatgcggatgaaacggtctcttttcaacaggatgtcctgctgacaatacggcttctttcaccttttctcttaattgcatgagcggttcactttcattaggttttgcaaaaaagactctcgggcgctccttcctgccaaactgtcctaactcattcagctctagtgaaaatgcagcggcttcatttgaaaggatatcaagcagctcgatgatcttttttaaacgctcatctggaatggcacctaaaaagatcagggtcacatgataatcatctggtgctgtccacttttgaaaggatagttcactccttagatccatgtcttttttgatttgatgcgcaagttgttcagggatgtgaatccctataaaataatgacggttttctgccacaatatcacctgtccttttttaacaaactttacgaatccccattgatgatagtataactaaagaaatgcagaatgagaagaaagggtgtcacatgatgaaggttgcacaaaatatagctgagctgattggcgatacaccacttgttaaattacagcggcttcagccagacaatgcggcagctgtttatttaaagctggaatcatttaatcctagcggcagtgtgaaggaccgcgctgcttacaatatgatcgtcgaggctgaaaggcaaggaaagcttacaaaaggagcgaccattattgaaccaacgagtgggaatacagggattggtttagccatgaacgcagcagcaagaggctataaagccatccttgtcatgccagatacgatgacaaaggaaagaatcaatattttgaaggcttatggggcgcaggtcgttttaaccccaggagaagaaaaaatgccaggctgtattcgcaaggcagaggaactggcgtctcaaattcctcatagctttatcccgatgcaatttgataatggggcgaacccagatgcacatagaggcacaacggctgttgaaatcatggaagctgtaaaacaacttggaaagccaattggagcctttgtcgcaacagcaggaactggcggaaccattacaggcaccggagaggaattaaagaaggcattccctcatttgaccatacgtgtggcagagccgaagggatctccagtcttatctggcgggaaacctggcaaacataaacttgttggcacaagcccaggatttattccccatattttaaacgagcatgtctatgatgagatcgtgcaagtaagcgatgaggatgcgtacaccatcacacgtcagcttgcccggcttgaaggaattttagttggtccatcatctggtgcagcctgctatgctgcgattgaaacagccaagcaactgccggcagaacaaatcgtgatctgtatgacagcagatacaggcgaacgatacttatcaagtgatgtttttcaagattaaaaaaggaacagggtcatgaatccctgttcctttttcttcgtttcaaggttaggacgatttgtcggacttcacctcagcctgctcccctgtgatgagtaaaacctgctcatcagtaagcgggcataaatcgagcgtctgctcaaactgttccatgatttgctgcgcagcctcgcctaaataggtattgtacatatgcggtaccggatagtagcttatctcattgaatccttgacatgatgaaagttctgctgccttctgccgatcatccatcacggagatatattcaatgcttggtgccatgatgatactccctgcggactctccgatgtacagcttgcctttattgatttcttctttcagcacgtcatcaagacgatgctttcttaattcctgcagcaaatagaaggtgttgcctcctgatacgtacatcacatcattttgtttcatcatctttgtgatttcttcagtagactgctcagctatctgaacggtctctagatgcatacctagttgatgaaaggcttctttcgctgcctccacatagtgcgtgacttcttccacagcactggctgttggaaaaaatgtcacgcgttttccttttaatgattcacccgcaaagtcagataagagagaatagctgtctttgaatgaagagcataagaacatttttttcactgtgaatcccctcttctctttttctatttcgccaattcatacatggcttgtgcatatagagcggttgctcttagtagatcatcgatttcgatatattcatccttctggtgtgcgcaatctggtctgccagggaatagaggaccaaaggcaacgcccgcttctaaagatctcgcatacgttcctccaccaatggcaatcagattagctggatctcccgtttgttcctcatatacccgctgcaatgttttcacaagcggatgatcttttgagacgtgatgcggagggctgtcgtcaaatttcagaagggtggcccctttgatgccttcgatcccttttttaacgtccttgccgtctgctgtcactggatagcggacatttaatcctagcttcgcttcctcgttttgtgtatagcggatcgttccaacatttaaagtcaaatctccgctaatctcatctttacaagcaatccccagctttttccctcttgtatcctgatcaaataaagcgttgatttgggaggtaaaagcaagcccgtcttcatctaactcttgtccacataggaaattggccatatgaatgcccgcattgatgccatgcgccggctccatggcatgaactgattcaccttttaatgtgagatgcagtccgtccgctgcattctttacctcacctgataaatgattgtgagcaagataagcttcaaaagctgtttttaatgattcagcatcgtgatcttgtgcagctgtcacagtggcagctgcctcatccggcaccatattcagccgcatacccgatgtgaattgcttgagcgtatagcgctgatgattttctgtaagttgatatgtaaatgacacgatggcatcaataatccctttttcagcatgaataatcggaaaatcggcatctggcgcaaatccaatttgcggcatcgcctcatgcttgaaataatggtccacacagcgccaatcactttcttcatccgttccaatgatcattcgaatcttttttgacagcttcatccctgtatcttttatcatctttagcgcgtagaaagccgccatggttggacctttatcatcaatggctcctcgtgcaaacattttattttctcttatgtccgctgaaaatggcggggttgtccagccatcaccagcaggcacaacgtccacatggcatagcacacctacaatgtcttcgccttctccatattcaatatgacctgcatagccatccacattcttgactgtgaatccttcgtcttccccttttttcaacatatactgaagggcctgatcgactttttcaccaaatggctttccttcttttccaccttcttcatcaaggacactttcaatttgcaaaaaagattgtgtgtccttaattaagtcgtctttttttcgtatcacttcagcttcccaattcatttttccattcctccttgaaaaaaggttgcaatccacccttaaaacgaatattatattaattgttttgtaataatgttcgtaaatggaggattttatgtttcagttaaaagaaaaccaaaccaacataaagaaagaattaattgctggtatgacgacattctttaccatggtatatattgttgccgttaacccaggaattctttcaaaagcaggcattccttttgaccaagtctttactgcaacaattatcgctgctgtcgtcggtacgctctggatggcactatttgcaaactatccgattgctattgcaccaggcatggggctgaatgtctatttcacctttacagttgtcggtggcggcggcatcagctatcaaacagcgttcagtgcggtatttgttgctggtatactctttattattttatcgttaacatcccttagaaaacaactgattcaagccattccagataatttaaagtacggcattacagcaggaatcgggcttttcattgcatttatcggcctccgtcagtctgggattatcgcagctgacccagaaaatctagtgaagcttggcaacttaagctcgcctgttgtcattttaacgcttgtcggcttaatgatctctgttattttaatggttcttcaaataaatggcgctctgtttatcggcatgttagcgacgacactgattgcgctcgtaacaggccagcttcatttccctaaaatgctgatggacatccctgcactacccgaaggcatgctgattacaaatccattcgctgcttttggcgatgtattctctcatcatttatatgctgtcgtcttctccttcttactagtgacgatttttgatacaacgggcacaatgatcggagtggctgaacaagcaggactcatgaaaaaaggccagctgccaaaggtacgcagagccctactcgctgactctgctgcaacgacgataggttctatgtttgggacaagcccaacaacagcttatattgaatcatcatctggggttgctgctggcggaagaactggactaacgtctttaacggtcgctgcactgtttattgtggcattgtttttcggcccgctcgttcaagccatttcttctttaccatccatcacatcacctgttctcatcattgtcgggtgcttgatgatgaactcagtgtcacgcattcgctggaacgagctagacgaagcattccctgcttttcttgtgatcctttccatgccgctgacatctagtatttctacaggaatttcacttggatttatctcatatccccttgtgaaactggcaaaagggaaatggagagaagtacatgtacttgttctcatctttgccattttatttttcattcagctctttttcttagaaggataacagaaacaaaaaaggcacattctaacaagggatgtgtctttttgagatgagtgaattttttattttgtaaattttctgtgtttattttttggatgtttgaatgtgacggtattctccataccccttacgcctattgggttgtaaccgaattcaaaacatggtatataccatgtttcgattcatgaagacaagttaaaaaacacgtaaagttgactttttggtggaactagatgcataataacgtgtataatagaataaaacattaagaaacacgaacatttaccattgttgcatgtccttatttcgcagttttagtgtagtaagttgtggttagtcaagtccatccgatcttattgatagggagtggttttttgaaaccttcaacaaaccgtatgatgactcgaattaaatcagtttatatgttcattcaagagaaaggtcttgtgacgacacaagagctggttgatgaattcgggatcacacctagaaccattcaaagagacttaaacgtgcttgcctataacgatcttgttcatagtccaagcagaggcaaatgggaaacaacgagaaaaaaagtgaaaatatcatcttaagcgtataatgaactgtccatataacaaaaagaaccggcgatatgccggttcttttcttttattctacatttatggtcgattgattaagctgtccaactcttcatccgtcaattcacggtactccccaggcgctagatcttcatctaaagagacagcccccatcgagagtctttttaaaaaaatgacttcatttcccactgcttgcgccatcagcttcacttgatggtactttccttcagtaatcgttaaacggatgcgtgtatcttcgttttcattcgcatctacttcaaccttcgccggcttcgtgcggtaatcatctaaaatgacaacgccctcttcaagacgcttgatgtcttgatctcctaatgggtatttcaaatgaacttcgtatgtttttggcacatgcttttttggagaaagtaattgatgagcaagctgtccatcatttgtgaggaggaggagaccgactgtgtccttatccagtctccccacaggaaatggctcccttgcgatatcctccggctctagtaaatcgacgaccgtttcatcccgcagatcttcagttgctgagatgaccccgtccggtttgttcatcattaagtaaatgaattctttatactctacacgctctccgtgtacgagcacttcatcattcgagggatcaacatgatctttcacctgcttcgccacttctccattcactgtgaccgcccgtgccttgaccagcttcttcacatcttttcttgaaccaaagccgctgctagcaagcaatttatcaagcctcatgaatatccacctcttcttaactcttttttcttaaaaatttcggcatacggctgccgagtacacgctcaagtaatcctaccttataagacaagaacagatacacaccgccgccagtgatcattgaaatcaaaatgacgatacccgcttgtacaattccaccctcatacgaaatcacttggctcacaagctgacatgtcacatacgccacaacagccataatcgccgttaaaataccaatgagaataaatcgtttgaaaatcctgcggaacgagtagccggcatggcgcttaatcatgataaacatatacaagatggacgcgctatagcctaacgcagtcgcaagcacagaaccatttccttgcagccagctgattagcggaatgttcagaaccgttttaataatgatccctaacaacagactgacaatggcgaatttttgtttgttaattccctgcaaaattgctgcattaatggtgaataaggaaaacaataacgcaacaggtgcataccagaacaaaattgacatcccaatctcaggatgaacggacggatagaaaaaccaataaaccggtccagccaatgccgagataccaaatgaagcaggcagtacgaaaaataaaatgacctgcatcgtctgatcaatttgtctattgagaagcttgtagttacgtgctgtaaatgattccgtaatcgtcggaatcaaggttaagccaaacgctgttgcaagtgacacaggaatcatcacgagcttcggtaaatataacgtcacaatggacaataccgctgtactaatatcctgatgtcctgatgcaatcatagctctgttaatggtatttgtatcaatataagaataaattggaatcgcaagtccaacaaacacatacggtgccgcatagctaaacagctctgtaaacatttgtttataagataagtcagaggaagcacctgtattcggctgcatggataagagccggtccttgcgcttcagccaatataaataaagcgtgaataaacccccaaatgcgccgataagtgctgcaaatgtggcatatccgacagcgatgacaagcccgccgtcaagcacttttaaaataataaacgttgcagttaataggaagatgattctgacaagctgctcaatcacttgggaaacagctgtcggtcccatcatggagtgtccttggaagaacccccgcacaagactcataataggtacaaccaaaagacctaaactgaccatccgaatcacatataccacttgatcgacagtcaaaccgcctgtttcattcgatccgccaagctgaatcttggcaaaaatcggtgcggtcaaatataaaatagaaaaggcgataatcccggtgacaagcatgaccgacatacccgccctgaacattttccttgttgtctcataatcgccgattgcattatatttagaaacaaattttgataccgctgttggaaaaccaagcgtagcaatacttaaaaagatcgtatactgattgtatccatattgaaatagcgctccaccagtagctccaaccattgcgctaaatggaattaagtaaatcataccaagaatacgagagagataagtccctatcgttaaaaccaacgtaccacgaagcagtttattagacatgcgcttaaccaccatttttctaatgaatattcaacttaactattttaccacatcatttcgacgcacaggtaacaaatccaatacagaaggcacaaaaccaatcaattcatatttcagccttccccaattttcgttataatagaggaatgactgaaagtagaaagaggaatgtaacatgaaacattatgatgtcattgtcattggcggtggaccttctggactgatggccgcgattgcatcagcagagcacggagcgactgttctgttaattgacaaaggaaacaaacttggcaggaagctcgccatttctggcggtggacgctgtaacgtcaccaaccgccttccagtagaagaaatcatcaagcatattcccggaaacggccgttttttatatagtgcattttctgagttcaataacgaggatattatttcgttttttgaaaacctcggcattgaacttaaagaagaagaccatggacgtatgttccctgtctcaaacaaagcacaatctgttgtggatgcccttttagacaggctccgcaacctcaatgtcaccattcgaacgaatgaaaagattaaaacagttctgtatcaagacggacaagcagctggaattgttacaaataatgatgaaaaaatttcaagtaacgccgttgtcattgctgttggcggaaaaagtgtgccgcatactggttctactggtgacggctatgcatgggcagaagccgctggtcatacgattacagagctcttcccaacagaagtaccggtcacatcagatgagcgctttattaaagaaaaagtgctacaaggtctttctttaagaagtgtggctgtcagtgttttaagtaaaaaggggaaacccgtcgtcacacatgtcatggatatgatttttactcactttggcttatccggcccagctgttcttagatgcagcggatttgttgtgaaagaattgaaaaaacagccgactgttcgtctgcaaatagacttatatccgaagcttaatgacgaagatctgttccaaaagcttcatcaagacctaaaagatgaaccaaaaaaagccattaaaaatgtcctaaagtcttggatgcaagaacgctatttattgtttctgttagaacggaacggcatagatccgcaagacacattttctggtcttgctaaggacaaactgcgcgcattcgcccatgattgcaaacattttatcgttcatgcgaatggcactctttccttggacaaagcgtttgtcacaggaggcggcgtttctgtaaaagaaattgaaccgaagaaaatggcgtctaaaaaaatgcccggtctttatttctgcggagaaattctagacattcatggttatacaggcggatacaatatcacgtcagcacttgtgactggcagacttgccggtatgaatgctgcactcgaagcaaaggagagattttcatgataagacgtgcacttccgattatcctagcagttgtgattagtttgacagccgctgtattcttaaagctgtccattacccctttaaaagtcgccattgtgttggcgtttaccatcttcgctgtttgtttaaaagaatacgtctaccgtcttcgtaaacgcattgaagaaaaatcatcttcacatatcgatagttgattaatggaagcaaaacatgttacggtaaagtagaggtcgagtgagaagctcgactctttttgtttgaaaatagttgagataggggatattaaacaaaatcctctgcttaaacgtgtagaacaacaggagagtgagatggtgtgaaaaacgtatcaagtgtattttggattgtgattgcgatcacatttgttgccgttatgtggggagctttttctccacaaacattacaaaatgtcacagatcagattcaaacatacattacaaacgactttggctggtattatttgatagtgatttcactacttgtcggcttttgtctattctttatttttagtccaatcggaaaaattacgttaggaaaaccaggtgaagagcctgaatttggccttttttcttggtttgcgatgctatttagtgccggtatgggaattggtcttgtcttttatggggccgctgaaccaatcagtcactatgcaattcaatcaccaacaggtgagactgaaactgcacaagccttccgcgattcccttcgttatacatttttccactggggacttcatgcatgggccatttatgcgattgtcgcgttatgcatcgcatactttaaatttagaaaagatgcgcctggattaattagttccaccttatacccagtattcggaaacagaattcatggatggattggaaaaacgatcgattgtatcgcagtgtttgcaacagtagttggcgtagccacaagtttagggctaggtgccgcacaaattaatggtggattaacctatttattcggcattccaaataactttttgactcagctcattattattgcgatcgtgactgttctgttcttgatctctgcttggagcggaattggtaaaggtattaaatatttaagtaattcaaatatgatatttgctgctatactcatgatctttttactctttgctggaccaactgtttttattttaaattcatttacagattcgatcggacaatacttatcgaatattgtacaaatgagttttagattatcaccaaatgatccagaaaagagagaatggattaatggctggacgatcttttattgggcatggtggatctcttggtctccattcgtcggcatttttattgcaagagtttcgcgcggaagaaccattcgagaatttttaattggtgtcttagtggctccttcaatcctcgtgttcctatggttctctatcttcggagtatcagctatggatttacaacaaaaaaatattatagatgtagctggtatgccgactgaaacgatgctgtttggtgttttaaatcaatacccgcttgccatgattacgtcgattttggcacttattttaattgctgtattctttatcacatcagcagattcagccacatttgttctaggaatgcagacaacctatggctcattaaatcctgcgaatagtgtaaagatcagctggggcatcatccaatcagctgttgcggcagtgctattattttcaggcggacttcaagccttgcaaaatacagcaaaactcgccgccttgccgttctccgttgtcattatattgatggttgtgtcactgtataaatcattaaatgatgaacgaagagcaatcaaacaggccaacaaagtcaataaaccaagaagtccaagagtaaaaaaagcataaacgctgtttgaaaaagccgttcctcatgtgaacggcttttttctatacaaacaatttaagattgtcatgctcttccacattcctataaaataatagaatgaagtgattcacaacatggaggtttttatgacgttacctacattcaagtacaacccagatccagtttcgttaaacgtgatcaaaaaagagcatacgacatgtcctgtttgtgagaaagaaagagattacgtgtatcatggtccattttatactgttgaagatgtggaaggaatttgcccttggtgtattaaagatggatcagccgctaaaaaatacgatggcatctttcaagacgatgcaagttgtgatgacgtcgatcaagaggaatatgtagatgaactgatcttcagaacgccaggttatcgcggctggcagcaggaatattggttaagccattgcggagatttttgcgcaatcgtccagtatgtcggatggaaagagatagaacatttagaggaagaactcacagaagatatcgaagacatttgcagcggcgggggattaacgaaagagaacctaaaacaatggctcgtcaacggaggagacttgcagggctacctctttcaatgtgttcactgcaaaaagcatcgtttatatattgacgctagctaatcaaacaaaaagggcccttcaaacaggtccttttttgatgccgtctattttttatataaaatgagtgcagaaaaacagtagagctgttctcctccctgctcacagatcaccgctacatcgtacttgatatcaataatttggtcgtcatccattccttttaaaaaaagattgatttcgctctgcaaatctttttcgtgttcttcatcaaatacagctacctttagcacatatgccactctcccttctctcgctactctatctttatgcatataaggacgggcatatgaacaaaaaagcctttcatctcaaagatgaaaggtcggacttcttttacagcttcggttttgtttctcctgtccaagcaagcatcccgccaatgacattggtcgcttgatagccttggtcttctaggaaatagcagacattttcactacgttttccggagcggcaaataatataatattcctgcgtttgatcgaatgcatccagcttctcagggatatctcccattcggatgtggacagcttctggaatcattccttctgctacttcctcgtcctcacgcacatcaacaagctgaatggcttcttcttgctctagcttttgttttaattcttctattgagatttcttttactgacacgacgctcatctctccttttaatcacggtgacaccattatagcaaatgattcacatcactgtgtattcacccgcttcgattgaaggaaagacggcagacgtttcttcacttcggctgtctgctgatcactttcaaactctacctttttgaatacttgataggccagccacatgtggccataggcgagtatactcacactaaagaacggcacgattcccggcaaataagcaaagagaacaaacagcagagccgagaaaacgagcatacagagtgtatattgcaaatatgagataccaagcaaaagagagaatttcagatagagacgttttttccaatcataatgagccagcagcggaaaaatataaaacaagctcacaacaaagagaaaaccaaagatataaatggcaaaacgaagcacatgcaaaaaccagctcgttggataaataaacgcaaggtctacatatataatcgtccctatgatcagcagcgccactccaattaagttagagcgtacaaactcctcacgatacaccttccaaaaagtccggaaaacgctgacttgctcatgcccttgtatccactttctcatcactgaaaataacgcagtggtcgcaggcatcaatccaaagatcccaagccccagcatggtgaacagcagccacagcaaattcgtataggcaagtctcatcacccactcacacattcgaagcattctgctcattgaaccatcatgatccatctctttcccctcctctctttctcattacaccgtctctttttgaaacaattcttctatttcaattgggcgcttctctgcaacagaccgccacatgccttccccaagcgcaatcgaataagcaccagcctctgctcctgctgatatgtcatagtgaattaaaggatcttttcctataaataaatcggccagaagtagagggtctccgccgccatgtccccctggctgtttcacgacttcaattgtctcttttgccccaaacatcggataataagaaatcgtctgttctgggaattgaaaaggaattcttgatggcacatgaaactcatttgtttcaatacgccccttcgtcccattaatggcaagccggtatccttcatatggcgctgagaattgaattgaatagctgagcagagctccttggtcatatgccactgatgccacatatgtatcctcaatgtcaatttcctgatcaaaaatacaggcgtctgggcgataatttgagtactgctgcgtttgctccttaccggattcaatatggtcgtcctctacctttgagcgttctacccgcggattccaccttgcttcataatgacatgtatccttcacatgacatgttccgcaatacctgttttctcccccctgcaagggattccaaggactttcatttccgtaatagttcagcgccccataggcaaatacttgcttcggcttttgattgatccaccaattgaccaaatcaaaatgatgcgtcgatttatgaatggatagtccgccagagaattgcctcgttcggttccaccttttgaagtaactagcgccatgatacgtatcaatgagccagctcagttcaacagatgtgacccttccaatctttccttctaaaatgagttctttgatctttcgatgaaatggattgtagcgataattaaaagtgactgtgaccttccctttactttccttttctttttccatcacttttttggcgtcttttgctgttgtgaccattggcttttcagtgatgacatcgagatcatggtcaagtgcctgcaaaatatacgtgacatgtgtgtcatcccggcctgccacaatgacgatatctggctttgcttccttcaccatttgatcaaatgcacctgcatgaaagaacgagatgccccgcagtgatggaaaacgctcctgacaaagtgtataccgatgatgatctatatctaggagccctgtaatcttgtaatgctcattgaaatcctctgtgagcggtttaataaacatattgaacgcacgatgactgagtccgcaaactacgacccgtttcacagtccccacctctttttctatcgattttcacgaagctgtttcatgagagacagcgcctcattggacttgtaagcatacacaggaataaaagcgaccatatctcggtgtaattgaaaggtatagccgtttagcttttttgtgcctttattgacttgaaccgcataatcgaccgttttccctgtcttttggtcctcgaccgtatatggccctgccgcttgatcatctatgcccatttcttcaagctgctgaaagctttcaggatcatcatatgttctaaacatttcttctgggacaagcatgatgtccccctcttttgcggtaatttcaacaagaagcttttcaggaatcgccggaaagatgtggacgctataagactcttgttctgtctgaaaagccttctcgactaattgatccttcatcccctttgacatgtcagaaaaaatcagaacatcaataccgtttgttttcccttggcaggctgacaaacaaagggcagcgatgaagctgaggagccataccgcacccctttttcgcctcttcatgccttctgaaaaacagacagcttctctagctcagttaacgccataataaaagcgcctgccccgtgcaagtcatttgtgcttcgctctctttcaacgtagtaatcataaaatccagcagatgttccgatacaaatatcattgatggtaaaatcaccgttttctgtctcagccgtcttatgatgaattaagccttggtatgctttcaccacatgatcgacataacgaaggctgacatacccttcattcatggcttttgccatggcgtacatgaataaacacgatcctgagctttcaagccaattgtcgctatgagtacctttatcaatgatttgatgccagagacctgtgtcttgatcctggtacttggatacactttccagcatgtctgtcagcgtttccttccaaacctttcgtccctcatgctcttctggcagatcctcgatcatatctgctaatgcaaggacataccagccaaacgatcttgcccaaaactcgggggaacagccggtcttttgatcagcccatggcatcacttttcgttcgtcccacgcgtgatagtacagacctgttttttcatcttttgtatgctttctcatgagatactcttgatggatcaccatatccaccagttcctcttcacctctcagctttgcatactttaaggcaaaaggtcctcccatgtagagaccatccaaccacatttgataggcataattgtctttatgccaaaacccgccctcagatgtgcgattcaatgtgcggtaaagcccccgaagcttctccgctgccagcacataccgcttctctcccgtccgttcgtaaagagggaataaaatgagccctgcttggatcgcatcaagctcatctctgcgaaataacaggtttccatactcatcaatgagcgaatctgcgtagcttttcacataattgaaatacgtctcgttcttcgttgcctcatatagcttcatcacaccgcaaagaaaaacgccttgatgataatgccatcttccagctggaggcagctcaattggtgtatgcgctttcataattgtttgtgctaatttctctgcatgctcaagtggtgatcccttttcagtcgataatgtcattcttcttcatctccctttttagtaaataccttcttccccgaatttcttcgctaaacggttcgccagcatgaccaaaatgagtccaacggctgctttaaatagaccaacagcggtactatagctgaattgtccttgcttaagaccagctgtatagacgtacgtatcaaagatttctgctacttcccggttcgttgcattgagtaataagtagacatgctcaaagccaagctctaatgtgtcaccaattttcaaaataagcagaacgacaatcacacttttaatggcaggaagagtgatgtgccacatttgtctcagtctgccggctccatccatttttgctgcttcatatagctgcggatctaccgctgtaatcgccgcaagataaatgatcgtcgaccagcctgcttcccgccagatcacctgtaaaatgtacatgggtctgaaccattcctgactaaggaggaagttaatcttttcccctccaaagaaagcaatcaattcattgattaacccgccatctactgttaacaaaacaaaagataaggacacgacaatcacccatgacatgaagtgaggaatgtatatcatggtctggacaaatttcttaaacaatgccaatctgacctcgtttaaaagcagggccaataagatcggaatcggaaagaaaatcacgacattcatggcaaataaaatcagtgtattttttaataagatgaaaaatgttggttctgtaaacaatcgaataaagtgtttgaagccaacccactcactcccaagaataccgagaaacggctggtaatcttgaaaggcaatgataagcccccacatcggcacatatttaaagacaagaaaataaatgagccctggcaaaatcattacatacaaaaacttttgactaagcaattgattaagtaagcgctttctcttttcttttttcaaagctgccgcaggcatacccttggcagtgacatcctctgttttcatagataaagcctcccctcatgctgatgcatgtgttaactgtatcttaaggatgaaaaatccgtctacaatcatatcatcagatcatatttacttaggggaagctactcaaaacgttacataaaacataagaaaatgatcctaatctcagaaaatgattattgacaaacctaccaaatttttggattaataaattaaggggaaaagattgttctgtttgaaatggggggttttatgaaaagaaggcagtataaattttattacaagcttgtgacgttttttttcgtgcttagtacgattcctgtcatcattgtcggtattttttcttatcagcattcgcaaaaaaccgcactcgaaaatatctcaaatgaaaagctggacagcgtcaaacaaacgcaatccaatattgagcatattttaaaaacagtggatcattctctcactcactatgtcagttcgccgcctctccttcaaacactggcagaacctttaaatccagaccaattccagctttataatcaagtacagcaggaactaaactacctgcaaacctttgacaccgatctttccaatattacactcgtgagtaaaatggaagactggtacatgaacaattcgggactttatcatgtcacaagcggagaccaagagaaagcgctcacctcttacctcaatataccgagtcattccagctgggcacttgaagagaataatccacttgttgcgacaaaagaaggaaaggcctccttttgcaaatacaatgtgaacttaatcaaacaactccctatgaacagtgtccagaaaaaagggatcgctgtcgccagcattccgagctgcacgattgctgacaatatgcctgacttctctcaatctgacagtatgtttgtcattgatacaaacggaaaagtgctgctacataaccgcaaagaacaaattggtgaatccttgaagaatcaagagctcgtcaagcatgtcctatcacgtgaagaacgatcaggtcaatttaacatgaagatcgaggaactagactatcaaattacgtttcaaaaatcagactataacgaatggacgtacttatcctttgtttccattccagaactcaaggcacaaacgaaatcaattgggtggatcacctttattatctgctttattttgttagcgctttcattactattttcatggtttgggtccagacatttttataaaccaatccgcttgttatatgagtcctttgcacgcaatgaatcctttttgcaaaaacagccttttcaaaatgaatttgagttgattgagtcgagtattaaacaaatgaaggatcaaaacaatgatttagaggaacgtattgagcagcaagtcacgcaccttcagcaatactttatggtgcggctattgctcggaaagctgacagaagaagaaattaacaaccggttccaaagtttgggattccctcagggctggtctcatttatccatgcttgtgacccaaatcgatacgttaaaaggaacaccttatgaaaaaaaggatgctgacttgctgttatttgccatcaatggactgatcgagcagatgattccgcaagatgagcaccttcagccaacggttgtcaatcagcatcaaacgacgattatcttgaatcactcaaagtcagatgaagagtttactgaatatttaaaccaattagcggaaactattcagcagcgcatcgaggaagagcttggtttatcgatcagcatcgggatcagccgccagtttaaggagctcacgatggcgaaacaggcttacattgaaggaaaagaagccttaaaatacaggctcaaagcagagaaaaaatccattatcttatatgaacatattcagcaaggaaaaacgtttaaaacccattttccaaaacagctgcagcatgatttattcgatgcgatgaaagcaggtgatcaaggcaaggcggatcattatttacatgtgctcctgcaatccattttctctaaaaatgctggaccgcatgaataccatatcgctctcgcccgttttttaaacaatttgattgagctgatgcatttgcttggcattgaattatttgaggtcgaagacaacaaaatgctgtatgatacgatttttgaatttaaaacctttgaagataccgaagcatggctgaaacatgagatcattcggccaattattgaccagctaggtgcacgtgaggactcacaatacaaaaacatctcagagaaaatcattcatatcattcatcaagaattcgactcagatcttacattggatgaaatcgccacacgcctgcattacaaccccaattatttaagcagtatttttagaaaggaaatggatatctcctttagtgaatatctctcgtcctacagacaccatgtcgccaaaaactggctcgtggaaaccgatatgtccgtcaaagaaatttcggaaaaactgaaatataaaaatccgcaaaacttcatccgttccttcaaaaaactagaaggcacgacccctggcaaataccgcgaccacaaaaaaggcacataagacaaaaagtcccgctcgcacaggaagcgggacttttttatttaaattgttcatttaaaatgctgtcttccagcactgaaagcggctctccgtacacacgttcaatatgagctgctccccaatcacaaagcgcattcagaattctttcgagcgactgtccgtattcacttaattcatattccactttaggcggtacttgctcatacacaattcggttaatcaccccatcactttcaagctctctcagctgttgtgtaagcattttttgtgtgatgtttggcatgagccgcttcaattcactcgtgcgtttttttccatgtgttaaatgacataaaatcacgcacttccacttcccgccaatgacctcaagggtcgcttccactgagatattatattttttcttttccatcaaatcctcactcctctttgtgcgaacaggcactttttagtacctatattacaaaaaagtacgtactttttttttcgtcatctatgttagataataactcttgccgatcggcttcgtctatcaaaatgtcatcatagaaggatgtgaacacttattcatgaagaaaaagcaaaaccactttgcccttctcgcactagccattagtgcttttgctataggaaccactgagttcattagtgtcggtcttttgccgatgatttcagatgactttggagtgagcgtcagccaggcgggctggaccgtctctttatatgcacttggtgtgacattcggcgcgcctattttgacttctctgacttcaacgatgaaaagaaagacattgctattgctcattatgctcgtctttttgattggaaatacactagccacgattgctccgactttttcagtgctattaatcggacgggtcatttcagccttatcccatggaatctttatgtccatcggctctacgattgctgcaagccttgtagtgaaagaaaaacgggcaagtgcgattgcctttatgttcactggattaacagttgctactgtgacgggcgtgccatttgggacatttcttggccatgagctcggctggcggacgtcatttggtgtgattgtcatcattggtctgatcgcactgatatccaactattttcttgttccatctcaattaaagcaaggcgtgaaaacatcatttaaggatcaagctgtcttattaaaaacaaaaagaatcttgcttctatttgtcattacagcaacaggatacggaggaacctttgtcgtctttacgtatttatcccctctcttacagcatgtgacaggtcttgcgcctgaggcggtggccttgatcctgcttttatacgggatcacgatcgcagccggaaatgtcattggcggaaaggctgctaatgagcagccaatgaaagcactgatttacatgtttatcatccaaagcatcattatgtttacccttagcttgactgctggattcacggtgctaggcattggaaccgtcatgctgatgggactgtttgctttcatgaatgtgcctggattgcaagtagctgtcgttgactttgcagaaagatacacaccaggagcagtcgacgtcgcttccgctatgaatatcgctgcctttaatgccggtatcgccatcggctcatttttaggcggcatcgtgacagatactcttgggcttgtgcatacaggctgggtcggcggcatcatggtccttatcgcagcaattctcacgatgattagttttcgaatggaacaacaagaacaaaatcaaaccatctaaaggagttttcaatatgaaccatttacaaagtacaaaaacattaaacaatgggatccacatgccaggatttggtcttggtgtattcaaggttgaagatggcgcagaattaatagacgccgtcaaaacagccattcaattaggctatcgcagtattgatacagcggctatttacggaaatgaagaaggtgttggacgaggcatacagcttggtttagcagaaacaggactgcgccgcgaggacctctttgtgacatcaaaagtgtggaatgccgatttaggatatgaatctaccctaaacgcatacgaagaaagcttgaaaaagcttcagcttgattaccttgatctgtatttaatccattggccggttgaaggaaaatacaaagaagcttggcgtgcactggaaaccttgtatcgtgaaggaaaagtcagggccatcggagtgagcaacttccagccgcatcacctagacgaactattaaaagatgcagacatcataccagctatcaatcaagtggagtttcacccaaaactgacgcaggaaacactctttacgtatttgaacacacatggcattcaaatggaagcttggtcaccgctaatgcagggggaactgcttcatcatccggtgatcaaagagctctcggacacatatggcaaaacacctgctcaaattattttgcgctgggatgtgcaaaaaggcgtcatcaccattccaaaatcaacgaaagcccatcgtttaaaagaaaatgcagacatatttgattttgccttatctgatgaggatatgaagcgcctttctgacttaaatgaaaacaaacgtatcggtccagacccagacaactttgacttttaataaaaacacccccgctttttaactgtgcgggggtgtttatgttgatcattttgattttttaaaggaagcttcatattcttctatgattttatgaccaccgtttgatttccacttctctacatctttcttaaattgatcttcactgatgtctccaagaatgaacttataagtcgcatcatcgatgatttttttcaactcgtttcctcgctctgaggctgtttctgaatacaggctttcagcaggattggcgacgatgatgttttgattgtcttcttctagctcttcatattttgtacgaaccgcatctcctttatttttcaagtaacgtttatcaattcctactagactgacaagcggctgtacgtctgtctgccagcttttcacttggctttcttctctgacaaatgtattcccttcttctttcttataatgctcgccatcaataccgtacgtcatgagaccatatacatcttcttctgcaatgcggtcaaagaaggccaaaatccgttttaattctgcctctgatttcacgcttgttttagggaatgcaaagatgccattatgaccacctgatgcccacacacgttctttgccatctgggcctttgattcggttgatgatatctatttccatgtttttatctgtcgcgtcatctctcaagttcactgcgtctaccatattcccaacatagatccctgcttttccttgtgagaataattcctgctgctgtgttttgcttgtaacagggaagtctttgttgatatagccattgtcacgcagtttcttcatgtatttcattgtattcatgtactcatctgtcatgaagtctggcgtgaatttgccgttttcttctttccagtctgtcggcattccctcatatgaaccgagtgttttaaatgccccataaatcaaatcgttccgatccgtaaagccaattgtatccgcttttccgttttgattcggatctttttcagtaaaagctttagctacctcataaagatcatccaatgtttttggtgtatccaaatttaaattttcaagccaatcctttcgaatgacaattccttgtcttgaaagtggtctctctctataaatgccataaagcttaccgtctatagaggcgtttttattaatcagttcgttcatcttacttaaatttggataatcctttaaatacggaccgacttcccagaacatgcctgatctgaacgcattaatagcagacgaattcttaatgtcttgaatcgtgacaatctgcggcagattccctgcggcaagtgcggaatttaaacggtcttccttcacggcatcaggcacccatgtaatatcaagctctgtatttgtgagcttctcaatctcttttatgacggaatccttcggcggctgctgatgatacaaaatagccatccaggtcagctttacctttttatctaaatcaaccttttcatctgatgaacttgttcctttgcttgaacatgcggatagaataccgcttgctgcaaataacaggacaaacgcaatcaaccataatttctttctccccataagatccctccgttgttccatctttttaaccttttacagaacctagtaatgcccctttgttaaaatgcttttgaataaatggatagacaagcagaactggaatggtcgctaccacaatgacagccattttaatcgtttggtctggcggtggtgtggatgatcccatatccgacatatctccctgcattccgcttgagacaatgacaatctgccttagcagcacctgaatcggccatttcactgaatcatttaaatacaggatggcggtcatgtacgtattccaatacgtcacggcataaaaaagtgaaatggtcgcaatagctggcaaagaaagtggcagcacaattttaaagaaaatccctaaatcgttacagccatccatcttcgctgattcctcaaggcttgccgggatgttttgaaagaagtttttcaaaatgatcaaattgaatgcattgatcgcaaccggtagaataagtgaccaataggtatcaagcagaccaagtgttttcaccacaataaacgtcggaatcatacctccactaaacaacatcgtgaagacaacgagaaacatcaatgttctccggccttttagctcctgacgagacagcccatatgccatgagtgaggacaaaaacatgctgacagctgttccaacgagcgtcacaagaatggacacaatgaggctacgatacacaatatccgtagagaaaatatattgataggcctctaaagaaaacgtggtcgggaacaagataaacttcttcgtgatgacctcttctactgtagcaaaagaggctgcaatgacatggatgaacggaagcacacatattaatgcgaacatgagtagaaaagagtaattaaataagttgaacaatcggcctttaatagaacgatctatgttcatcacgccctttctttgaaagcgttatcatttcgtccgaaaataagctgcagcctgtgacgatatcgtgattaaaatgtaacaaacgggggaagaaagcgtctataatcatcttgacagaccaactggatggatcctgtcaatcgtgcttttatgctcatgaaacaaaagaataagatcatcagctaatgacatgattatgccctatgcctgatcattttcttctaggatttccgtcgtattcacatcaggtctgtagcctaactcctgctttattttttccgtagtccagggcttttcttcgttttctgatacggcataatatgtcccaaaggggacggtcgtttcaatcgctgcctttgtcatccctataagatcttcatgtgacagaagtgttcgtttcgttcttcgtttcttgtgtaatgcctccatctcatccgtcacaaccgttccaatccgtaaattaataacagacatccccgtttgatcgtggaacaaacggcctagctgttctgaagcaaattttaaaataccatagacatttttagtcgctggcacatcgtctgttgtaatatttcgccctagtaaggagcggccatcctcttcataacgatcggtcacatgattgctgcttgcaaaaatgacttttcgtatgccgagacgtgcagctgatcgaaacatataataggagctcctccaaaaaatatcattcattttttcaaactcctcaagattcatcacatcatgcgtcatatccatgtttaaaaggtgcatgatgacatctgtatctctcggaatcgcctcatataattcctgttcattcgctgcatctgctaaaatggctccttttacacaactcgtttgatcaatgatggtgatctcgtactcagaagagagcgcttttgttaatatacggcctatcacaccgcatccgccaatgatcgtgatctttttcatctgtttcctcctttctattgacgtagtatgtccaagcctttatgggttacagccattttttcaaaaatcgagtggcctcgtgacgcatagcggctgtttcaaaatgacctgcatgaagaccaacaagctgataccgttctttcaatgaagcagtttgataggtttgactcaatcccttttgaatgcgtccgacgccttcagcaggcgtgagcggatcaagttttccaactaggcttaaatgcggccttggaaaaatcatttcctgaatatcagctgctgtaaagtactttgctaagcttggtacatagtaataaaagccatgcctgtctaaattgttcgtttcaattaatgtgtgatgatcgacctgtgcgcaaagatcaatacacacactgaccctctcatcaagcgcagcagtccaccaggaaagaagccctcccattgacattccaaaaacagctaaccggtccggcagcacatcagatcgagacagcacataatcaatcgcacacatgctttcatacagcatcatgccccacatcacttttcctgttaaaagcatctccttaaaaatttcactttctgttcttcctcttctctcaccaaaccctgcatgatcgatagccaggacactatagccttttgatgtgaactctttcgcatatgaaggcgcttgcaaataatgagcacctttgatcagctcttccttcccatccacgtagttcccgccatgagagtgttggaacagcacaacaggtctttttttcaccgtatcctttggctttacaaaataagcaggcacttcctctacaccatgaatcgaaagaatgagtgtttcgactacatacgattcacgttcctcgatctttaacgtatatgcctccacgcgatggcgttctggcatttctcctaacagactgagcagttgttcacgtttgctttccttttccattgacgtcactcctcattttcttgatcacctgttaaaatacgaggtcgatgaagtaatcaccttgttttcgacaaaattatgtcccgggaaataaagaacacccaccggttcataccgatgggtgtcatcattagttcgcaacaatattgacaagcttcccaggaaccgcaatcactttgcgaatggttttcccttcaagctgttcttttacgcgtgcatcatttttcgcaagctcttctaactgttcttttgttgcatcagcaggaacggttaattttgctttcacttttccattcaactgtacgacaatttctacttcatcgtcgacaagctttgactcgtcatattgcggccatgcttcataagaaatagacccttcatgaccaagtttattccaaagctcttctgctaagtgcggtgcaattggagaaagaagtttcacaaagccttctgcatattctttcggcagtgtatcagccttgtaggcatcattgataaacaccattaattgtgagatccctgtattgaagcgcaggccttcataatggtccgttaccttcatcacggtttcatgatagctgcgttctaatgcgcctccagtttgctccgtcactttatcactgattgtgccatcttcatttgtgaatagacgccatacacgatcaaggaaacggcgagcaccatcaagtcctgtttcagaccaagcgattgatgcatctaaaggtcccatgaacatttcataaagtcgtaatgtatccgcaccatgagattctacgatatcatctggattgacaacgttcccttttgatttactcattttttcattattttctccaagaatcattccttggttgaacaatttcatgaaaggttcttttgtaggaacaacaccgatatcatacaagaacttatgccagaagcgcgcatatagaagatgcagtacagcatgttctgctccgccgatatatacatcaacaggaagccatttctttagtttctcaggagatgcaagcttttctgagttatgcgggtcaatataacgtaagaaataccagcagctgcctgcccattgcggcattgtattggtttcacggcgtccttttttacctgttacaggatctacaacctcaacccactctttgatattggctaaaggtgattcacctgtaccacttggcttaatctcagtggttttaggcaaaatcagtggaagctcttcctctgaaacggctgaagaagttccgtcctcccaatgaataattggaattggctcaccccagtaacgctggcggctaaatagccagtctcttaaacgatatgtgactttcttttcgcctttttgatgttcttcaagccatgcaatggctttttcaatcgcttcttcttttcctaatccattgaggaaatcagagttaatgtgttttccatcacctgtgtaagcttctttttcaatgtctccgccttctacaacttccttgattggaagatcaaatgttttggcgaattcatagtcacgctcatcatgggcaggtaccgccataatcgcgcctgttccataagtagccagcacgtaatctgcaatccagatcggcatcttttcaccatttaatggattgatggcataagcgcctgtgaaaatacccgtcttcgtttttgcaagatctgtccgctctaagtcgctctttgattgaatttctttgatatatgcttcgactgcttctttttgagcagctgttgtaattttttcaacaagtgcatgttctggtgcaagtaccgcatatgttgcaccaaataatgtatccggacgcgttgtgaaaacagtaaactgttcgtcatgtccttctacttcgaaatgaacgtgtgcaccttctgaacgtccgatccagttacgctgcatatctttgatgctttcaggccaatcaatgtcttctaaatcttctaacagcctgtccgcatatgccgtaatcttcagcatccattgcttcatcggacgtctttcaactggatgccctccgcgttcactttttccatcaatgacttcttcatttgcaagaactgtaccaagcgccgggcaccagttcactggtacttcatcgatatacgccaatcccttttcgtacaatttcaagaaaatccattgtgtccatttataataattcggatcagtcgtgttgatttctcgatcccaatcatatgagaatcctagtgattgaatttggcggcggaagttattgatgttctcttctgtaaagaccgctggatcattccctgtatctagtgcatactgttctgctggaagaccaaatgcgtcccatcccattggatgaagaacatcatatccctgcatacgtttcatgcgtgataaaatatccgttgctgtgtagccctcagggtgcccgacatgaagccctgctcctgatgggtatggaaacatatcaagcgcatagaactttggtttatcttccgagtcagatgtggcgaatgttttatgtgtcagccaataatcctgccacttcttttcaatttcccgatgctgaaaactcaatgtgaaaacctcctttaatatgtacggctgtatctgctcagatgaccactgcaagaattcagatttttctaaaatcaacaaaaaaccctcatccctagaaagggacgagagattttttggttcccgcggtaccacccttgttagcgtcactttctgtttgtacgctcacttaatatctttaacgcagacatgcgacagaagctttaacgcaactgcaactctgaggcgagttcagaagcagatttgattgactttcaccagccgtcaattctctaaagacaaatactgctttcctactactcctcttcactgttcttatcgtaaccgtcatctaagtagtattttatagaattatgatcataagtgcaagcaggtttgtatacaatgggaatgtaccctagatcagggtaaagtagaggatattattcgtgtggagatcggttatgacggttggagtctgcatcctgtgaacgctgttctcttacaaaatcaaagcttcgcagaactgcttctcctccgtaacctgaaataattgataagatgaccaagtgcagactagaatcgggatttgaggataagacaagcagtgtagcggcaatcatcccaacgagccaatcttcaataaaccctaaataaataaacttttttgtcattctgggcttctctagcctgccttttttctttacgtgaccgagaatgcccatgacccctccaatggcgcaagcaataatgacttgttgcagcattttcatcaccttcctaaagcccttagaatagtaaagcgacttcaggctgtccagccccctgtaatgccattctgctgttccgtcataatccatgtaaaaggtctattctctctaacgaagaaaaaaagcttgtttcttccattatatgtgaatgacccaaaaacaatcttgatgcattggaatcatttttacctaatccatattaactatttttgtcattttatgaattatgagcaattgattcctcctttttctaaagaaaagtctccttacttactatattctaatggaggacaaactatgatgacaaatttaacaaagccattgcaatcattgaaacagaacatatgttatgttacgttattaaggaatacttttggttgaaaagacagccatttgatatgtctgctagtagcagcaaaggagggtaatatggtcagctcgaacatcttcggcttgcaaaaacagcttgaactcataaaaaaagcgctagatcatgcgcggatcggtgttgtcattacagacccttctttagaggataaccctatcgtttatgtgaaccatggctttacacacatgactggatacaaaccagatgagattcttgggcgtaattgtcgattccttcaaggaaaagacacagatcaagagcagcttgatttaatacgtcatggaatacagaataaaatacctattaccacacagctaaaaaattataaaaaagacggtacttttttttggaatgaactcaatatagatcctctatacattgaacaagatgataaaacatttttcattggctttcaaaaggatattacgaaacagaaagaatatgaacaactcctagaagattccttacaggaagtcacctctctttcgacgccaatcgtcccaatcaaaaatggtgtatctgctctaccactcattggaaaactatctgaagaacgctttgatgccattgttgcgaagttaacttgtatattagatgattcaaaggatgattatttaattgtcgatctttctggcttaatcgatgtcgatgattccgttgcaggacgcattttcaagctgcatcatcttctcagtttaactggaaccgaactgatcatcacagggatcaaaccgcagcttgcgatgaaaatgaaagacttggatacagatttccaggatgcgatcacatatttgacggttaaggaagcaatcaaaggattaccattagctgaaaaccctgtgtaaacagggcttttttagttaaaccgcccctaaaaatggaaaaatgaggtatgataggagtaaatagagatttaggggggcttctagatgatgatgttactcatcataggtcttttatgtgtttgtttcgccataggatatgccgtcaatttcttattactcaaacaccagaacgagcatatcttttcaaagaaactattttatccttttttgatcttgggtctcgtcttttccattatgtcattatcgtttgctgccacagatgcaccgaaggcacaagcagatccatcttcagaacagctgttaaaggatcaaaagcagctcacatctgacatatcgcgcttaaaagctgataaagaggagcttactgcctctttagaggacgcaacaaaggataaagaaaaactagctaaaaagctagaaaccatcacctcagaaaaagaaacagtcaaaaagcaagaaaagaccattcaagcgcttgaagagaaaatagacaagcttgcctcaagcaatgaaacactcaaaaaagagaacaagaaaagcagcagcgatacgaagtcttccactgttcagcgctccgctcctaaagatgaaggaaaaagtacaggcggtcatgaatcgcagaaggaaacaaaaaaagaatcagcagcctgtaacatcaaaggaagtgtcaatggcatttatcacacaccgagtagcagatactactctagaacaaaaaatgtaaccgaactattctgctccgtagaagaggcagaacgtgcagggtaccgggcacctaagcaatagccatgtgtcacaaaaaaagaacctcctgtcagcccaatcgggtgtcttaggaggttctttttttagatttctcttcttaatgctgctaatacattcgtttttgttgctttacgtgccggattaagccctgaaaggatcgctacccctgcgctaatcactgttgctgtgatcacaaggctgagcggaatataggagaaggtgatcgagaattgatcgcttgaccctccctctgacatggacgacaaaatggctggaatgattaaattgacggcgaaactaatgatatatgagatgataataccgatgatcgacccgatcaccccaatataagcactttccatgaggaacattcgcttgataatcgatggattcgcaccaatggctttcataatcccaatctcttgtgttcgctctgttactgccattgtcatcgtattaaaaataccaattgcagaaataatgactgcgatacagccgacaaaaatgagtccaattttgaagacagtaaagaacatatccataccttcgagctgattcgtcacagagatgacttggtagccctcatctgtcagcttattcgtgagtgcaccgacattgtcgaatttatctgcatagacagaggtcattttctcgacatttcctgcttcaggagatagatcaagtatttgaccaaattccttttcatacgcattcggaatgagaattttatgatcctgctgccactccaaatttggctttttcatgactcctactacacggaaatcaaatgttttttctttgacgacttcattttcttcgttgagttttggtaccttgatttgaatcactttatttaaaatatctttcgtgtagccttttggctcttttggttcttcttcaccgtttgacgtttgatttaattctttttcataggctttgcgctctttatccgtccagagaagttcagccatatgatacccaaccacaatttcgtttgctgatgttgggactttccctctgtctagttcaagccctgcttctttttcctctttcatatcggtcagagcagcctgcgtttcacttgagcggtcatcgagctcgacgtttaccgatggaacgagagacgttcttgagacgacagatttcacatggtcatatttctttaaatcatctaccttgacggcacctttttccttgcctaacactttcacttcagtgatgatttgctgtttcatgatttcatcttgcgccgatttttgcaaaccaaaaccgacagatgctagaacgattaagaaagagcatgccattgtcgtcgcaagaatggtcataaacacacgcaatctatttttcttcatgtttcttctaatgaatttgacctgatctctaaatttcaatggtctgttcccctttctttaatacaccatcatgaagctggaacgttgtatctgcaattgaagcgacttcatcgtcatgtgtaatgatgacaaacgtgattcctttttcacgattgagctgctggataaaggctagaatttctgcttcggtttctgaatctagactgcctgttggttcatccgctaatataatagatggatttaaaatcaaggctcttgcaatactcacacgctgttgctgcccgccggacaactcattcgggtaatgccctgtatgatgttcgaggcctactcgtttcagcatttcttttactttcgtctttcgttcagacggcttcacaccttttaaagtgagcggaagttcaacattttcatacgtcgttaagctcccgatcaattgaaagctttgaaagataaagccaaagtgatctaagcggaagtccgcccattctttttcattaaagccggtcacatcggtaccatcaatgacaatttgtccgctcgttggcgtaatatatcctgaaattaagttcaaaagggtagatttccccgaaccacttcgtcccacaatacaagcaatgtcgcctcttttgatggataggtcaatccctttcagcacaggaatttcattctctctgccctttttaccaattttaaacacatgatctaacgcttgaacctgaatcatctctactccctactctctgtttatctttttcgatatattaagaaataacttgttagtgcacctacaacgccgcctattaacatgccagtgatataaccaaacatggaattatcagaagaaaatccaacccatccaaatcctagaacaccgaagacaatgaccataatctgaataggtctatccatttttgagtaaaggaagaaccggccatttcgttcaatcggatgcttcataaagctaagcaaaccaatgagataaaatacaatcatcatcacaatgggtacgatgaattcttcaccagtgaaccaaagtggatattcatgttgaaaacgttcagtggtgatataagtaattggagaaataggcgagatcaaataattgaagatccgatccatccacattccacttgttttcatgataaaatctaaatgaacgatcggtagtccaatcactaaaaagggtaaaatagctgtgctaaatgcaacgattgcctgggaaatagcacttcctgttaaagtaccagctgcaaaaaacaagctatacatcatccaagaggacagcagcgaaaagaaataaccgctgttaaaaccaggtacctctaatggattaaggcctaatataagtaaataagtgagaacatatgagacggcatgaataatcgcaatgattccagcgcctaagaagaacttagtgtgataaatcgtacttctgctaaatggcaaggataaggtaaaatccatctgccctttatttctctcaaatccaagctgaatcacagcaaagaaaattcccattaaccatgaaagggagagaaaagcatccgtcttaaagatataagaaaaacgtggtgaatccgtaatacaaactgtatcgtttatgcacgtttgaaaagacgaatattccattaagaatgcaaagggcgtcgcaagcgccgcaaccagcatcactaaaataaatgtcagctctgattgcttccactccttatataataattgccgctttaccatctccgtttccctccaaactttgcaatgaatacttcttctaaattcacaggcagttcatgccatacttttggctgcagcgacttcaagtactctttagcctctacatcggttttaagaacaagcgctgtataaaaaatgcccgcttgatctaatatagcaacgccattttttcgtatactcaagttcatatcttcttcaaaagccatctgaattttgacataatcattctttaattcatctagatccatgacacttgtgagttcatttccttctaaaaacccgattcggttacacatacgctcaatatcctctaatcggtgcgatgtaatgagaatcgatgtttcacgttccgctacctcgtcgatcatgagctgaagaacatcatttcttgtgacggcatcaattccatctgtcggttcatctaacaaaatcaccgctggcttgatcgcaaagcttaaaattaatgacagctgtttttttaaccctgtcgatagttcacgatatttcactttttccggaatttcatagcggttcacaagctcattggcatatgtcacgtcaaacttcggataaatatgctttaacagctggacaagctgtccgtaattgtatctgtcaaagtagggattgacgactggcatatacacaatattttgcttcactaaaggatggtctttcacaagcacgtctttaaaataaatctctccttcatctggaagaagaatttgctgaatcaagcggagaagtgttgtttttcctgagccattcctgcctagcagaccgaagatctcaccttcgcctattttgaaggaaacgttactgagtacttcacgtccatttaatgtctttgatacatttctaacctcaatcaacttgttttcctccctcaagacttgagccgatctcttctatccattccttcagttgttgaatatcaataccggcataatgagcttctatgatgagttgttttaattgctccttcatctccaacaccttcccttcattcagctttaactgagccccttctgttacatacgtaccgcggcctcttagtgtttcaataatcccttcccgctcaagctctttatatgctttactgacggtgtttgggttggcgatgataatggtggcgagctctctgacagagggcagtttgtcaccaggtttcattacaccttttagacataaaattttcaactgctcaatgatttgttcatataatggcgcagcgcttcgtggatctatttgaatcatgatggctccctctttcctcattcatgcttttgcagtcctatcgcttgttcatgcccttgcattaaagggattgaattaggtatcaaatctttttgaacttcaaaaccaatgaaaacgagaacgaaaaaaaatgtacatgctaacgcaacagccagcaccatccacttcaaattgattggttttttttcttttttcatggttgaacacctttcttcactttttaagtgtctttagtgtattagttgttgtagtacacctaacacaataaagacactcagccaaaaagtcaatagccttttaaaaaataaaaaacagacccttaaaaaaaggatctgttcatcattcgttgtcgtaagaaatacctaaaatcatttgattttgcaagctttgaatttgaacacgcgccctgtctaatcgctctctttgctgatcattggcgacatcttttaatttttctaattcgttcaccgcatcttcaagcataagctgcgccttagaaaattcgtcctcattataatgctcttggcgtaagttcaaatcaaattgctcatttgcaaactcaagggtttcagtacttttttggataaattcatcgatcgactgccttgttgccatcttgcattccctccatttcatcattgctcccgcctattttgcccacgtaaagctttttcactaaagaaaatgttggacagattcaattgtcctccttcatgatttttgttaaactttaaggatgcctattattacgcaaggaggttactgacttggatcagcataacccttttttatattcaaacagcgaaaaacgctatcacacatggaactatcatttgcgagagcactttggtcataaagtatttaaagtggccttagacggcggctttgactgcccaaaccgtgatggtactgtagcccacggaggctgtacattttgcagtgcagctgggtctggtgattttgcaggaaaccgggctgatgatctcatcactcaatttaacgaaatcaaagaccggatgcacacaaaatggaaagacggaaaatatatggcgtattttcaagcgtatacaaacacacacgccccgcttcctgttctaaaagaaaaatttgaaaccgtcatgaatctggatggagtggttggtttatctattgcgacaagacctgactgcctgccagatgacgtggtggagtatttagccgaattaaatgagcgcacttatctctgggtagagcttggtcttcaaacggttcatgaacgtacagcgatgctcattaaccgtgcccatgattatgaatgctacgtagaaggtgtagaaaaactgcgaaaacacggaattcgtgtctgctcgcatatcatcaacggactgcctctagaaaaccgggacatgatgatggaaacagcaaaagctgtcgcagatttagatgtgcaaggaattaaaattcatttacttcaccttttaaaaggaaccccaatggtcaagcaatacgaaaaaggcaaattggagtttctaagccaggaagaatatgttcagcttgtttgtgatcaactggagatcctgccgccagaaatgattattcaccgcattacaggggatggcccaattgaattaatggttggtccgatgtggagtgtaaacaagtgggaagtactaaatgccattaatgctgagctcgaaagacgtaacagctaccaaggcaaacgtttcgtcagattggaagaagcagccaaatgattttgaaacgcatgctcccttttagtaaagagctgttagaacgggcttgtcaaaaaggcgacatcgtcattgatgcaacgatgggaaatggccacgatacacgctatttagctgatcttgtaggaaatgatggacaagttttcgcattcgacgtacaagaggaagccctacagcagacgagaaaaaggcttggcgagggatatccttacgttcatctgattcacgatgggcatgaaaaactggctcatcacctgccaaaggatgtttatggacatatttctggtgcggtgtttaaccttgggtacctgcccggaggcgataaagccgtcaccactcaggctcatacaaccatcgaagccatcgagcagctcctcgactggcttaaacccggcggtctgatcgtccttgtgatttaccatggacactccgaaggaaaaagagaaaaagaagtacttcttgactattgcagatcacttcctcatgaagaggcacaagttttatcatatcaatacatgaatattcaaaacgacccgccttttgtggtcgccattgaaaaaaagctcaaatcctaatgatctgagctcagattattgacaaagggccaaaatgatttttattttagccctttgtcttctttcagcgtgatagaaaacctttgcagtctaggaagaacgagcaccggaacggagcgaatttgacattcgtgagtaccggcgcgcaggactgacaaagaatgcgagggtttgtctgcgcgctgaagctcaaatcctaatggatttgagcttttttatgaggatttcatccaaggcattttctgataggtccggtaagctcttccgttgatatagaaaaagaatgatgttttcccgcttgatttgatcagccgttttgccagcttattcatctctttttgggctgtcactttttcatcggacaaatagactgccagtaaccctctgttaatcaatttgtgaaagttttcgtgcggaatgcctttcagctgctcatccgctttttcaataaaatgctgaagtctatccatcatctcatgatgagaagcatagtaggagcaaaagttcagatctcccccaagccggtcttcttcttggtcaattaaataatcaagtaaaatgtgcagaccttggatataagggaaatagctttcgtaaatttgcttcgcctgcttttctgtaaaatccggctgcagcgcatacgccacaagacagaaaatccctaacgttgatcctgcacaagctgaaaattcataccattccatcttaggcaaatccttttcatactggcgaaaccacgattctagccgcgggacccgctcatgaggaacgacgtgtttatgtacttgcaattcactgtagtaatcacacagcgtgtgtaaatatggctgaatgattggataatgctcaaggcgcgtaagcacgtcttgacatgtgcggacaagcgcatgtaaatacccatgatcctcttgatcatcacggaattgatagtaaggcttgagctcagcatgaatatcaagcgcatctctcatcgcttgatgcagcatatgaaaatcttttggatccagcgacgtgctgcggtcacataggttatctaagtaatcactgatggtttgatacgccacaatgaattcaatacacgtttctttcgcctcacctgctagaagagataaaatgcctccgccttcacagtgaaaggttttactggatatgctcgctagtgcctgcgttcgcagttcttcattttcaatcatttctgcatgagcccgccactttttcagctcctgatgaacaagcggaaaaatatctttatacacctttgtcatcagtgcaaaaggacgctctggtactgacaaatcaatccacccccaacttaaagctcaccatcaaatatattgatctgtaaaggctcttgctgccttaaacacatcttctctttccggttcattaaaaatttcgtgatacagttcttcccattcacggtatgatttattggttgattcaatgccattgaaccatttgatcaccctcgttttatccacgatcttatcatcgcccgcctgcattaaaaggagcggaatcgatttaaagacattcgttggctgcatggccgcatcaatatttttgatcagctctcggtaccagcgaaccgacacctttgttacgtaaagagaatcatttgagtctgcctcaatcacagcctgattccgtgtggctagttcaatcgacagccctgactcgactttaaaggacggtgccagcacatttagaccttttgatgcaaaatccattagcttcttcggtttaaattgcagacctaaacaaggtgatgataaaataaggccatcaatcttcgtatgggtatactgcttgatccactcaattgaaatgagtccacccatactgtgtccaagtaaaaaagtaggaagcctgaatgatttcgcatgttcgatccattcatctattgtatcaatgtattcctgaaacgagcgaatgtggccgcgcgcacgtgtcgatgtcccttgcccagggaggtcacccataacgacgtgatagcctgcatttcgccacatttcgatcagccatttatatcggccgtgatattcactcgcaccatgtacaattacaattgtaccaactggtctttcagcatgccaagtccacaaagtaaacacctcacaaatgttgtattaagaaaggaagtcgaaaaagtgatttatccatatcatcagtttacacctgagattcatgaatcggtctttgtcgcagataacgtcaccattactggtgatgtcacgattggagaatattcgagcgtgtggtttcaaaccgtcatcagaggcgatgtcgctcctgtgagaattggaaaaaacgtcaatattcaagatttatcctgtctgcatcaaagtcctggaaaaacacttcttatagaagatggtgctaccattggacaccaagtcacattacatagctcaatcattcgaaaaaatgccctcattggtatggggtccatcattctcgatggtgcagaaattggcgaaggtgcctttatcggtgcaggtagtcttgtccctcaaggaaaggttattccaaaaggatcactcgcttttggccgtccagccaaggtcgtccgtcagttaacagatgaagatatccaagacatggacagaatccgtagagaatatgtagaaaaaggacaatactatcgttcccttttatcccgttaacatcatacgtgtatcttcactttatcatgtttttttcaggatattaagcaataactatgaaccgcttgttattttacccttttccactgctttctatcatgacaaaaaaggttttcagcacaaagctgaaaaccttttttcattaactaaagatgacttctttcggttgatgattcaactgctctggatcaatgctgcgctccacataaatgctgtgccaaatcataaagatgaggacggtccaaatcttacggctatgatctgctttgccagcacaatgctcatttaataaatcaagcacatattgcttgttaatgtattcatctgtttgactgtttttgatgatgtctttcgcccaagcattcatctcatttttcagccaatgacgaattggcacagggaaaccaagctttttacggtttaacacatggtcaggcacaatgccctctgctgctttacgcaataaatatttcgttgtgccatcttttgttttcagctcttctggaattttagaagccgcttcaaaaacgaccttatcaaggaatggaacacgaagctcaagagaattcgccatcgtcatcttgtctgctttcagtaagatgtctccgcgcatccacgtatgaatatcaacatattgcattttgttaatatcactgtagcctgcgctttcctcgaagtatgtcttcgttacgtcacgatacgtgatgcttggatcataatgttttaagagatttttcttcactggctcttcaaagattttcgcattaccgatataacgttcctctaatggcgtacagccgcgaacgataaagctcttccctttcattccttctggcattaatcgcgccagacgaagaagaagctttttcagcatagatggtacagattcaaatggtttaagagaaagaggctcacggtaaatattatatccgccgaacagctcgtccgctccctcacctgaaagaacaaccgtcacttgtttcttcgcttcttttgccacaaaatacaatggaatcgccgccggatcagctaaaggatcgtctaaatgccagacaatcttcggaagctcgttcatatattcctctggagaaatgacggcactgaagttttgtaagcctagcttatcagctgtttccttcgcgacatcgacttcactaaagccatcctgctggaagccaacagagaatgtcttcagctcagggtgtaattcctttgcgacagacacgatgaaggaagaatcaataccacctgataggaatgaaccaacaggtacatcacttctcatgtgaactttcacagaatcatagattgcatcgcgtacttcttctattaatttctcttcttgtgtttgttcaggcttgaattgaaccttccagtatgtcttaaattcgatctcctgtcctgggcgtaaaataaactgatgaccaggctcaactttgtgcaccttttgatcaagtgtatttggctcaggaacgaactggaacgacatgtactgctgcaatgaagtctcatcaaataagatgttctcgttcacagccatcaagcttttgcgttcagacgcaaagtacacttgctcatccatttgtgtaaaataaagcggtttgatgccaaaaggatctctcgcgccatataattgctgcgcttctttatcccaaattaaaaatgcaaacatgccgcgaagtttagaagccgcctcttctttataatgacggtatgtggcaagcagtacttccgtatcagaatctgtgctgaacgtatagccctttttcacaagctcttccttcagctccacatagttataaatttctccgttgaaaataatccaatacttttcatcttcataagaaagcggctgctttccgtgctcaacatctataatacttaaacgtctaaatccaaatcctacatgctcgtcatgaaagtaaccctcatcatcgggaccacggtgaacgatgagacgattcatttgtttaattaactcttcctgctcagtagtttcggacaatggacggtgattaaatacaccaacaaacccacacatattattgcctccacgttatgttatttcttaaaagtagacctataattagacagtattttgtccgattttgtttcacattttttcactttttgtagaatttttttaatcaaaaggaaaaccgcttaaaataagcggttttctatgttgttattgtcctaatgcttctttacgaagcgtatcggctttatccgttttttcccacggaagatctaaatcatgacggccgaaatgtccgtatgcagctgtttgtttatagatcggacgacgcaggtcaagcattttaataatgccagctggacgaagatcaaagttcgcacgaaccacttcaattaatttttcttcagaagcttttcctgttccgaatgtatcaattgaaatcgatacaggctgtgcaacaccaattgcataagcaagttgtacttcacaagaatctgcaagaccggcagctacgatgtttttcgctacgtaacgagcggcgtatgccgcagaacggtcaacctttgttgcgtccttcccagagaaagcaccgccgccatgacgagcgtacccgccatacgtatcaacgatgattttacgtccagttaaaccagcatctccttgaggtccaccgatgacgaaacggcctgttgggttaataaagtattttgtctcttcgtcaatgagttcgcttggaaccacagggcggatgacatgctcttttaagtcgctttgaatttgttcaagcgtcacttctggtgcatgctgcgtagaaataaccactgtgtcaatacgaacaggtttattttgctcatcatattctactgttacttgtgtttttccgtctggacgaagataggcaagtgtttgatccttgcgcacttctgttaaacgcagagataatttatgcgctagtgaaatcggcagcggcatgagctcttcggtttcgttgttggcaaaaccaaacatcaatccttggtcacctgcaccgatcgcatcaatttcttcttcagtcattgttccttcacgtgcttcaagcgctttgtctacaccttgcgcaatatcagcagactgttcatcaatggatgtgagcactgcacatgtttccgcatcaaaaccatatttcgcacgtgtgtagccaatttccttaatcgtgtcacgcaccgtctttggaatatcgacataagtagacgttgtaatttcaccgcttactaatacgagacccgttgtaacagaagtttcacaggcaacacgtgcatttggatctttctttaaaatttcatccaaaatgctgtctgaaatttgatcacagattttatccggatgcccttctgttactgattctgaagtaaataaacgacgattttgactcataatggctatttcctcctgtacaagaccacatcatcccaagatgaggcctccaatatgatacggaactcgttccctcttatatttgaaaacgtttctattagagatgttattggcaatttgttcatatgatatcccaaaaataaaaaaaccatttccttcattgcgaggaaagggtctgagatcgcatgcctttcactcttatcgctcaaggtgttcttgtaccttgcatcaggttagcaccttggtttctcagcatattcatgcctttttcacaagaaaccggttgctgggcttcatcgggcctgtccctccaccaactcgggataagagtatccgttcaataagatatcttatctcaaacccttgcatcatgtcaatgcttcatcagaattatctcccctctttttttacctcacccttagcatcaccaaaaagcatattttcatagcagaaatgaaaaaacacacacaaaaatatttaaatagtatagactattattatcaatgtgttatactaatcgaaacaaacaaattcaacggtaaaggaagggtttttttatgaactcagtggatttaaaagaagatttgcagtcattgttctcattagaaaatacgcaccaaaatttatctgttccgaaacttgttgaaaagattttggcacgtgatgaaggcgtcttaacatcaacaggagctgtccgcgctacaactggtgcctacacaggacgttcgcctaaagataaatttatcgtcaaagaagaaagctctgaacataaaattgattggggtcaagtcaaccagccgatctctaaagaagcatttgaccgtttatatacaaaggttgtgtcatacttaaaagaacgtgatgaactattcgtctttgaaggatttgccggcgctgatgaaagataccgtatgccaattacagtggtaaacgaatttgcatggcacaatctctttgcaaagcagctgttcatcagacctgacggatccacaccttcttcaaacgaaaaaccgttcaccatcttatctgcaccgcactttaaagcagatcctgaaacagatggcacaaactctgaaacgtttattatcgtttcttttgaaaaacgcaccattctgatcggtggtacagaatatgcaggagagatgaaaaagtccattttctctgtcatgaattacctgcttcctgagcaagatattttatccatgcactgctcagcaaacgtcggtcaagaaggcgatgtcgcattattcttcggcctttcaggtactgggaaaacgacgctttctgcaagcgcaagccgcaagctgatcggtgacgatgaacacggctggtctggctcaggagtcttcaatattgagggcggatgctatgcgaaatgtgtgaacttaagcgaagaaaaagaaccgcaaatctacaaagccatcagcttcggatcagttcttgaaaatgttgtgcttgatgaagaaacacgtgaagcggattatgatgacacattcttcactgaaaacacacgcgctgcttacccaatcgaaatgattgataacatcgtgaagccaagtatcgcaggacatccttctgccattgtcttcttaacagctgatgcatttggcgttttacctccaatcagccgtttaacaaaggaacaggcgatgtaccatttcttgagcggttacacaagtaaattagcaggaactgaacgcggtgtcacatcaccagaaacgacattctctacttgcttcggttcaccgttcttgccgcttccagctcacgtctatgctgaaatgcttggcaaaaaaattgatgagcacggcgcaaaagtattccttgtgaatacaggctggactggcggaggctatggtacaggcaaacgcatgaacctagcgcatacaagagcaatggtgcaggcagcgatcgaaggtgacctcgacaacgccgaaatgatcactgatgacatctttggattacacatcccgcttcatattcctggcgtaccagatgaagtgcttcaaccttctaaaacatgggatgaccaagaggcttatcaagaaaaagcacacttccttgccaatgaatttaaaaagaacttccaaaaattcagccacgcagcaagtgacattgaagccaaaggcggaccacgcgtataatcaaatggcaaaagctgaggggaatcattccctcagctttttttgttagttcgttgaatgtaatgacacgagacggtaagtaacctttgtcacattgtctgtcagctccagcttttcaacgtgtgctgtccctgttttttctccgtctttcgttttacgcacctcaagcggaatatttaatggataaatgcggtacccttccttcatgagctcaaatacattttcttcaattcttgtctcttttcccttcgtgacaatcattgtattaaattcaacaggcattcccatattgaaaatccccctactttctaaatttcgttatactgcttattttaccacatttccgcttttccggctgtgcatccatgtcgtcagccttctgacaatttcccgattatgctgcggtgggaaataatggttgtatccgtgaaaataccaagtctccactgactttccgtgctggcgcagcgcatcttctaataaatacgcatgctcaatcgatacattctgatcctcttctccgtggatgatgagaacaggcgcttcaattttgtccacatcatttaaaggcgttctgtcctcataggcctctggcaccttgtgcgggggaccgccaatcacacgcttcatcattcttctcatatccacacgttcttcgtaggtgagcttcatatcactgacgcctccccatgtcacaaaggaagccgcctcttgtttcatttcaacagcggtccaaatgcccataatccctccgcgcgaaaaaccaaagatatgaatacgatcctgcttcacctttttgtggtgctttaacaattgaaaggcagcaaaagcatctttccggtcctcaccggcaaaatcttcgttcccttcgcctccctgatttcctcggtaaaagggagcaaatacgacaaagccctgcgctgcaaattgcacaatccggcctggtctcaccatccccacatttttaatgccgcctcgtaaatacaaaaagccgtcatagaaaccttctccggccggttcagcgagcagccctttgatccgaagcccatctgcctcataggtcactgtaaataagtgaatatgcggatggggggacggaaaccttcttttttccacaatcacttgatttctctccttttcatctgttcttacgtcaagtgcttaaaatgatcgcttctgcgacgagctggcctgattttgtcaccatcggcgtgccgccgcctggatgagttgttcctccaacaaaccaaagcccttcaatgtcctttgactgattattgattcggaagaacgcctgcttgaacgagttggaagacatgccataaatggcgccatgatatgctcctgttttctgctgcagatcaagcggagtttgaaccgcttcatattcggcaacctcatccatatcaaagagacccttttcctttaattttgttttcaaatgctgcgggtatgtctcctttagcatgccccaatcttgctcttttgtcacataaggcgcattcgtcagtacaaaaaggttgcttcttccctgtcctccgcttaaagctggttctgaatgacctgaataacatatgtaaagcgttggatcctgaggcagttgttttttctgaaaaatatctttgaattcttgctcataattctctgggaaaaacacattgtgatgggacagctgttcatagactttaggtacacctaataagagaacaaagccagataatgacggttcaatattagccagcttttgatttaaaaagcttgggcggtctttttcatcaatcagatggcggtaaacagtcagcgcgtccgcccctgcaatgacttgatctgcttcatacatctgctgagccgtctctactcctttgattcgccggtccttcacatgaatcttgttgacttgttcattgaggtgaatctgtacgcctaattcctttgccaaagtctcaaatgcttcaactaaacgatatgtaccgccctttattccataaatccctttctccccttctaaatacgccatcatattaaaaatagccggtgcctcatagggagaagagccgatgtatgtagcataccgtccaaacatcgccaatgtatgcggatgacggaaatattgacgcagcaggcgttgaacggttgtaaacggtttgactgagagaagtgctttcatgagctttacatccgccttatccttccacgtcaataacaaacgatttaaaaactgctcctcagccttttgaaaaagcatctttgattcctgtaaaaatgcacggtattgcttcgcatcttcaggactgaatgctgcaatttgagattccatttgctcaaaattgggcgtaaattcgaccgtatgtccatctgaaaaaacgtttttggtcagaggagaaatcggataaaatgtgacataatcctccatccgtctatgacaggaagcaaacacttcctcaaagtatgacttcattgtaatggtactcggtcctagatcaaaagagtagccagctccctgatggcgctgcaatttcccgcctaaagccgcttctttttctaatatggtgacctgaacccctcgtgactgcaagcggatcgctgctgataatccgccaagcccgccgccgatgatgatcacttttttcattcgtaccttctccctttccattcatacccttcttttttcagcgcgattttcatagaagcaaggccaatggcgatcaaacttaaaatgctgaccggcaataaaaaggccattgcagatgttctcccgttctcgatatcaattgccgctttgatcgacacacccagcccatagcaaagaatggctatgcatatactgagcacatcaagctgcagcaatgccatcatcaaacaaatgacaggagccaaataaagcagggtgtataaacaaaagacactgcttaataaagcaatgcttcgattgactcctgggaacaaatttttccggtagccttcccaaacctcttgtccactctcatacattctcatatacacaaatggatgaatgcttgcaagtgtgaacggaaagcctttttccttcactcgtctagccaaggccatatcatccactagcgaattcttaatcgcttcatgcccgccgatgtcgtgatagcaattcttttcgatggcaataaagcctccatgtgctgcggcaaaagcggggttccttgaattccttacccacttcactggcagatgacagcctatggtaaacatcatcatgggaaccacaagatgctcaaagaatgtacctgttttttgttctgggaagcctgacagcatgcccgtattttgcgtgcatacctgctgatacactgcttcaattgcccctctttttaaccggacatccgcatctaaaaatagcagccaatcagaagctgctgcctcagcgagctgagaacaggcaaatgatttacctagccagccttgctttaacgcttggcctgactggacacgaatccacggatacgcttctgcaaagcgctccacaatcgctcttgtctgatctgtcgaatgatcatcaagaacaatgagctctttcggataaagacgttgatcaacgatcgactgaagacaggcttctatccgcttctcctcatttctagccggaatcagtatcgataacgaaatgggttcatctggcgaaaaagaagcggactttatcacgggaaactgcttcatattccatatggtgaacataaactgacaaagcagcagcacactgatcacggttaagaagagcgccatgttttcacccactttttaaaagaatcaaacgcatcacttgttgactgacttgtccttgtcatctgtttaaattcttcgtttaatgaaagatcaggatcagcgatgacctgcgcttgatgtcggtttaactgcgtttcaagcagatctccaagcatacgcgtcacgtccttgcttcgtagtgccccgccagatactaaggcatcttcgccgaacacaacagaaactgtcggcttttgaaattgattaaatgtatactgcaaggtcacaggcttcaccacgacctgctcaaattgcttcactaaaaaagaagcccctccttccagttcaagcggccgcatatcctgatgcataattttcccctgtggaaaaagccatacagccccgccagcctgcatgttctctcttgctgtcatcaatgcttgtttgacacttttcaggttctctttatgaaccggaaacgctccaagcttacggaaaaaagcatattgcttcagctgcttctcttccatcatcatgtagtgatcaagttcagacgctttttctgttaaaagaaaaatgatcagtccatcccaccatgagctatgattggcgagataaagaacaggcagcttctccttcgggtccaccgagcctttcatcatcacacagcggaaatgcttatggagtaaataccgctcaagataaagtaaaaatatacgtctaaacgatcggcttttgtcgctttctttcaaatcgaacccttccttcacacaaaatgacaatgatcagtgctaaataaaaaatgacatcgagtccgccctttaatgccaaaagaccaaaaaagaacaccatcgcctgataaatacggctcgtccagctgagtgccttttgatcaattgaaacaagcgggaaaagaaatgaaagtcctgctccaatcataccccagctcataaaattctcaaaaggaataccataaaacccaccgccgtcataccacacccaaaacttccgctcagctgctactggatctaatatgaggtcaagcaagacaatccatatccccgtttcgacggctcgtctccactttgactgctgactggataaaaaaaggctgtttaaaaacacgccaacccatgcaaacgcaatggttaagggcacccctgccactagaaaacctaatgtcggataatagtcataggccccgaatggaaaccccgttgtgatacctacccactcaaccgtaaatgtaagcaccccaacaatggctgcccttttgatcacaagcccccatgagccataaatatgtcgcccaatctctatgacgcagcaggcatacagtacaagaaagattccgtttgcaaactgaagccatgctggcacttcaaaaaggaccattaagataagacctactaaataccatccaacaaatacccaactcactttatacacgaaaccgctcctttatttctgccaaattcaagaaagcattcattcccctagtatagaaaaaaagacgcgttctataaataaacaatgcgcttcttattttcatctaggcactcaccaaaaatcccttttcacatactttaatagtgatctagaacaaaggaggcgaattactcttgaatcgttccatcaaagtcagactggcattcatcgtcgtggtcctgctctttattccatttgtcgcctgtaaaaaagaacaagagcagaccgtacaagtagccgaggtgacccattcggtcttttatgctccgctatatgtcgccttatcagaggatttcttcaaagaagaaggcttggaggttgaactgaaaaccacttggggcggtgataaaacgatgacagctctcttatcaggcggtgctgatatcgccctgaccgggtctgaatcctctatctatgtagaggctcaagacacaaaggactctgtcatgaactttgcacagctgacacaaacagacggcacatttcttgtttcaagggaggaaataaaccaattctcttgggatcaattaaaagggaaagacttcttaggacagcggaaaggcggcatgccgcaaatggtcggtgaatatgtcttgaaaaaggaaggcattgatttaaaaaaggatcttcgcatgattcaaaatattgattttgccaatatttcaggtgcgttctcctctggaactggcgattttgtgcagttattcgaaccgaccgcttccttacttgaaaaagaaggtaaagggtacattaccgcctcctttggagaagcttctggcaaagtgccatatactaccttcatggcaaagaagagttacttagaggaaaacaaagagacagctgaagccttcacccgagccatttacaaagcgcagaaatgggtagaagccaagcagcctgaggagatcgcaaaggccattcaatctcattttcctgatacagatcttgatgtcttatcaactgccatcaaacgctacaaacagcaagattcctatgcaacagatccccttctgaatgaagaggaatggaacaaattgcaggaaatcatgaaggagagcggtgaattgccggaatttatcccgtacaaacaacttgtcgattcatccattgcaaagaaggtcacagatcacaaatagaataggaggtagcacatgtctttccttcaaattgaccatgtgacccacacgtacttctctttaaaagaaaaaacaacggctatacagcacatcaatatggagatagaccaaggtgaattcatctcatttattggtcccagcggctgcggaaaaaccaccttgctgtctatcatcgcaggcattacgccgccctctgaaggtcgaattttaatcgaaggaaaagaaccaaatcaaaaggagcatcaaatcggctatatgctccagcaagattatttgtttccttggaaaaccatcaaggaaaatgtgattctcgggttaaaaattgcgaaacaagattcacatgaggccacctcagctgcccttgatttactgccaaagtttggactgcatgaagtagaggaaaaatatccgaaggagctgtctggcggaatgaggcagcgtgcggctctcgcccgaacgcttgcagttgatcccggtctgcttttactagatgagccattttcagcgctagactaccaaaccaaactgacattagaagatctcgtctttcacacattaaaaaactatcaaaaaacagcagtccttgtgacacatgacatcggcgaagccattgcgatgagtgaccgcattttcttattctcaaagcatccaggctctatccagcgaatctttaccgtaccagacgatataagggctctctctcctttcgaagcgagacagaccccgcgtttccaagagctctttcaaacgatttggaaggagctgaaaacagttgaaacacagtgaccttttacatgaagcctatcgcaaaaaataccgaatggaaaaacgtatcacacgtatctatcagttcatcatattcgccagcttcttttcgctttgggagcttgccagtcatttcaggctcatcgatccgctgattttcagttcaccatctgcggtctgccaattatttgtgcaaaaaatatcagatggttctttagtaaatcatatgagtattacgttatttgaaacggtgctcggttttctacttggtaccttttgcggcattttgctcgctgccgccttatggtggtccacccgattagcaaacgttcttgatccttatttagtcattttaaatgccatgccaaaagttgccctcgcccccattttaattgttgcccttggtcctggcatgatcagcatcgtcgcgatgggtgcgatcattagtgtgattattacaacgatcgtcatttacactgcctttcaagaggtcgatgagaattatttaaaggtgatgaaaacctttggcgcgaaaaaaggcgtcgtctttcgtgaggtcatgttgccagccagtattccaacgatgatttctgccattaaagtcaatgtcggtctttcttgggttggggtcattgtaggggaatttcttgtatcctcaaaagggctcggctacatgattatttacggctttcaagtcttcaactttacactcgtgttcttaagtcttttcattattgctgtgtttgctaccatcatgtaccagcttgtggaatggctcgaacgccgttttctccaaaaataaaaaaagcacagggatggtctccctgcgctttttttaacgaatcaaaccgttcttttctaaataagcaagactttgtcttagcacatcatctttcataataaaactgaaattcttattttttgcgatagatcttggcaagtctgcgaaaagaacaggtcctttcgtttcaaaatacgtgtcctgcttcactagcctttcaatatcagcgaaataaatattctttacgatgaccttttctctgcctagcacctgatattggccaatatacgttaattcacgaacaacagcacccgtctcttcttgaatctcacgtatagcggcttggtctgcttcttcatttggctcaactttccctcctggaaactcatagccccgatcctcatgttcagtgagcagccattttccctggtagcggcagatggcccaaacatgctttggatgacttgaaaaaggcttctcttcaaaggagagcttgaccgtattatgataatagtctttaaatacatgcatgtgaaatccctcatatcctgtccttgcttcttgtaaaacatcataccacagatcacatttctctgaagaatttttatcaaaagtgaaacaaacgagtggtttcatctcgtctgtatttaaaatgaggttattgttgctaaaacctttttatcatctccaacttcatccaattttaatcatgaaaccttttatcccttgatgacgtaaatcaataagggtttgtcctatcacgacgaggaggaaaacagcatgagtataacaaatgggtcaaaacaagagaaagatcaagcgcttccgctcaggaaaaatgagaaagaagacgcacctcatgaggtgatcaagaaacacctcatcaaaggacaaaagctagatttaacaaaagacaatccaaatatcgaccaaattcatatcgggcttggctgggatctggctggccagccaattgatttagatacgcaagtgtttctcttaaatgaagaggacaagctgttgtctccaagccatctgatctattatcatcagcagcaaagcttagacggggctgttcgtcatctaggtgatcatcaatttggcggcgggtatcgagacaatgaaatgatcattatgcaattaagcagagtctcacctgatattcataaaatcgtcgtaacagccacaatacatgatgcacacgagcgcaagcatcattttggacaagtgaccaacgcctacgtgcatcttactgatcaaatctcgcaacaagagatttgtacctttcaattaacagaagattattcgtattgtacctccatcatttgcgctgaactcataagagatgaggacgaatgggaaattatcgcgactgggcaaggaactacgttagatttaaatgacttatgccgcatctacggattcacatcttgacgcaggaaaggagccggcaccaatgggatttcatttcaacacgatagaagaactcactttacaagcagaaggcagcggaatcttttttgcgaaaaaaggcgcaatgattgccgatcaaggaacgtttcaataccgcaaacgactactcgggacaaataaaggaaatatggtcagtcaagtatttaaccacatcagcagaaaattgacaggtgaaaaccttgaggtgatggaagtgagtggacaaggtacttgttatttagctgattccagcgagcacgtgacagtgattaatcttgaaccgagcggtccttggcagcatgtaagtgtagaaagtgaagatctacttgcctttactgaggagtgtcattacggcgtgacaccagtaggcgttggtattttatcacagaaaggactgtttacatcaaagctctcctatcaaggccacggagcgcaggtcgccattaaaacgaatggaaacccgctcattttaaaagccccctgccgtgtagatcctgacgccattgtcgcttggacaggcaaagcaccgaaggtcaaattagatgtgaactggaaaaccttcattggacaaacatctggtgaatcctacttatttgagtttcaagaacaagaccaaattgtcattatccagccatctgagcgcacatctggcttacgggttggtttagatgataaccgctacaagcctcaaagccagagctcttctcatgatttcactaattcacagacatcacagcaagagaataaaggcgggcttagtgacctgatcggaggcatcttacaaccgcgaaaataaagcatgtagaaaatctctacatgctttttcaattcattaatccatttgtttcaataaagttctttgtctcttcattcccgagctcataaatcattgagtaaatctcttgtctttttcgatccatttcatcattcggactgtcataatgatattctagaaacggaacatgcgctcgaaagaagcctttccaatctgtcatatactgttcatcgaaatagtctctcagctgcaaaatttgatcatcatctgcttctatttgaaattgccaagccgccgcatctctatgctgcgatatcgacccatcctgtacagatacataatatgtgtgtctcgccatctgattcatcctttttcctttagtatgaccagatatgaagaaattacggctttttgcgtaatttattcttcaacatgtccaacacatcaataaacaactgtggaatgggaattccgagggcattggctgtcgagacgatttggtaagattcataaataatataaaagatgatcgctaaatccttaatcatcccatttgtcttcagcatgacatcgaagaaatgcgccatcgatattaaggagaccgtcacaatctttcgaacaagccgtgtaaaaaaacgtttcattgtgagctgcccagtcaaagattctcttaggcttgaacaaattaattcgatggccatcagtgtcactaatatcatcagtaaatatcctgctccaccaaacagaaagcccatcgctgacaaactgactgtaaacaacgaaaagatgcctaaatccttgctcacatggcatcaacatcctttcaaagtggaactccttacctcaatagtatatgccggatcctcgcaatagcttggacgacaaaaaataaaggcgtcgtcttttaaatcagacagagtgatgacaagaaaaaaagccgccttgtgcggcggcttccattcttagactctgacatcaataaagcgagcgtctgaatcctttggctgaacagcttgaggctgctgctgaacttgatccagcatgaccatggcttgtgctgtattcgtagcaagctgtgaattcaacaaactaatattgagtgttctttgaatgctcgcgacttgctgactcatcattcctgcaatggaagacatcttctcccctcccttctcttttctcttcggctgaaagccctatgatttcaatgggctgtctgtcacaaatccatcaaaaaagaatgccgatcttatgatcgacattcctttcacattcgtattatcctaaaaatgctttaagcatccagttgtgtttctcaatagattgatgtatcgcaagcagcatatcacctgttgtttcatcgccaacttctccagccagctccattccttgctttaattcctctgcgatattggagaaatcatcatatagatttttcaccatttgctccgctgattcattgccttcagcttcttgaatgctagaaatttctaagcattctttcattgtcgcaacaggctgtccatttaacgcaagcatacgctcagccaaatcatcaatgtatgtcgctgtttctgtataaagttcctcaaatttctcatggagtgtaaagaagtcttttccctttacgtaccaatgatagttatgtaatttcacgtaaagcacagtccaatcagctacttgtttattgacgacgtttaataatttttcagacatgttcattcctccttatgtaattgcgtttatagtatgagaatacccttttcctattatactgaaacctaccatgaatttcttctattttgactgcatgaaatatatgttaatatggaaataaggagggagttagatgctgttacttgggattatcagctttatcattatctcaatcgttgtctttttatcactgtggacaacatcgaaggcttatgaatataagcataaaatcgattcaccacaggatgctgaaccaaaccaacgtcctaaccctaaataaatcgcacttaatgatgtgaggtttctgcttcagtagatgaactctcttttttcacatcacctacgtggatgttcgtcttcggcatattatgctgctgtttagctgtcacatggacttgtatgatataaaggccatcttttttaaaggctgtatgcaattcatatacacctttgttctctttctttggctgaatcatcttgctgttatctttgtcaccatctttccacacttcaaattgaacatcgtctgcatcatcaacaggggtatcaccatatgtgacagctgcttttactataacgctttcatttttttccacttgctcaggtcctgtaatcttcacttctaatagctcaggcacctcccctttgccgctatttgctgcagagttcccacatgcacttagtaacatgagcatcaaaatcattcccaacatttttcgcatcccgagtttcccccttcttttactgacatgtccattttaacaaatatcccctattttgacatctcatgatcgaattcaaaaaaccggacatcaacatgtccggtttatgatctattaaccaaatacttttagaagctcttcttgatcttgagaaagccagaaacgcatcaaacgttttgccccttcaaggtcatgaagcttcgcttggccgcattgctcttcgtttgcagcaggaatctctgttacctcaactgcatccttgaatgttgcatcaagaagttcaacgatctcttttggagtaggtgcaccactgaccactaaatagtagcctgtctggcagcccattggagaaatatcaatgatatcaaaatgatcgtatttctctgagtgtgttctaatgttaaacgcaagtaaatgctctaatgtatgaatcgtatcaggtttcatcgcctgcttgttaggctgacaaaaacgaatatcaaatttatttacttccccatctgatcccactttatgaacgccgcaatgacgaacgtatggcgcttttacagcattatgatcaagttcaaagctttcaactgaaggcataatcaccactcctataattgcaatttcctatattataacatatttctccgaccagcttagtttataaaactttccttccttgtccttttttcttatactgtgaaagacagacaaggaggaacctctatgaaacaaatttttatcggcatcatacgcttttatcaaaaatgtatttcccctcttacaccgcctagctgccggttttacccaacatgctcaaactatgggctagaggcgatcaaaacgcatggcgctttaaaaggcggctggctcaccatcaaacggattttaaaatgtcatccgctccaccctggcggcatcgatcctgtcccgccgaaaaaggaaaaataacttatttttcttcatatccgttgacgactaagtcaagcttgcctgttccaggatcaatgacaagaccgtgcacaggcacatctgatggaagaagcgggtgattttttacaacggacacactgtccttcacgctctcttcaacagaactaaagcttttgagccactgtttaaagtcgattcctgagtattccagtacttcaatacgcttttctggaataccacgctcaatggctttgtttaaaagtgtttgactgtctattttgctcataccacaatcatgatgcccaatgacataaacctcgtcagcatttaattcgtaaacagccactaaaatgcttcgcataatacttccaaatggatgagaaacaagagcaccagcacttttaacgatcttgatatctccatttttcatgttcattgcacgcggaagcagctcgacaagtcttgtatccatacatgacagaatgacagcttttttctgtggaaacttcgttgttgtaaattcttcgtatttcttttcttcaataaactgttgattatattcgatgatttcatctaaaagtttcatacgtttgcccattcctttatcttttttaaaaataaatatagcacaatgtgagaaatttcgtcacgttttgcagcgcatttttttaaaggaaacatctgctgatgaaatttttttattttcctcttttcaaatcgtaattattacgatacaataactcaggacattaaatcgtaatcatttctatctaatagattgagaggagacatttctacatgaaaaaaatcttttatattttaacagctgctttatttgcgatcggtcttgccgcttgttcaagcagtacggggacaaatgcttcaaaaggaaaggcagacgggaaactaaccatttacaccacgatcttcccgatccaagatttcactgaaaaaattggcggttctcacgttcatgcacaaagtgtgtaccctgccaatgcagatgcacacagctttgaaccaagttcaaaaacgatggttgaaatggctgaaggtgacgccttcatctacagcggtacaggagctgaagcattcgctgacaaaaccgcttctacgttaaaagaccaaggcgtgaaaacagtcaaagcagccgaaggcatcaaattgttatcgacaaaagaagagcatgcacatgaagaaggcgaagaccatgatcacgaccatgaaagtgaagctcatgaccatgatgaacacgaccatggagataaagatcctcacgcatggttagacccagtttatgcacagcaaatggcgaaaaacattaaggacactctcgtttcattagatccagatcataaagacgaatacacaaaaaactatgaaaaactaaaaaaggatttgcaatcgctagatcaagagttcaacacaacgttatctaaagcaaaacataaagaaatccttgtttctcacgcagcttacggttattgggaaaagcgctatggcattgagcaaatcagtgtattaggattatccgcttctgaagagccttcacaaaagcagctcgaaagcattgtacaaaaagctgaaaagcatcacattcaatatgtgatttttgaaaacaacgtcagcagcaaagtatcagatacaatccgcagtgaaattggggcaaaaagcctcacacttaaaaatctagaatctattactgaagatgatgccaaaaatggcgaaagctacatcagcttaatgaaacaaaatctaaagaccttaaaaaccgctttaaatgattaattactagaacctcgggtgatcatccggggttttttgctgcaaaaaagcacaccattgtaggtgtgctttttattacatttgatattttttcttaaacaactcggctcttccgcctttttctccgaatttttgtcgtcctgtataaaaaggatgcgtatcagagcttgtttctactttaatcacaggatacgttttcccatcttcccattctactgtctcattggatgtctttgtcgatttactcaagaagcggtaaccgctgtttacgtccataaatacaacttcatgtgaggttggatgaatatctcttttcaatgtcaaaactcctttcgttatcaaaacgtaatgattacgctttatatttatattttactccctcttttacaacttgtcaaaaatcaagctttcttagtcaggaagaataatctaaaaatggtggagaataataacatcatgaaaaagagaagcgataagaaaggcggagaaaaaattgactgatctcgttttagctagaagcctgttcggcacaaccatgggctttcatattatttatgcctcgcttggcgtcggcatcccgctaatgattttgttagctgaactcatcttccaaaaaacgaaggatcctcactatgctgtcatggccaaacggtggacgaaagcgcaggctgtcttgttaggtgtcgccattccaacaggcacgattgctggtacccagctcgctcttctatggccaggttttatggaggtcatcggaaaggtcatgtcactgccatttcagattgaaatttatgcgttctttattgaagcattatttatgtctatttatgtgtacgcagcggatcgcctatcacctgctatgcgcatcattaccgttatttttgtcgtgattggcgcagccgcttcagcgattctgatcacaaacgtacatgcgtttgaaggaacacctgctggctttcaaatggtcaatggagagattacaaatatcgagccttggaaggcctttttcaatccaagctttgtggtgactgcgacacatgtcgtgctgtctgcttttacaacaggtgcttttgtaattgcttcggtggccgcttttaaaatgctcaaaacaagaaagaatgagaaactctatacttttcatcgaaaagccctttttcttggacttattgtaggaggccttttctcatttcttacggccttaaatggtcatgagtctgctcagcttctgtataaatatcagcctgaaaagttagccggtgctgaaggtttatttgaaacacaatcacatgcgcctcttgcaataggtggttttactgatgccgattcacaggaaattaaaggagcaattgaaatcccttgggcgcttagttttctggcaggaaatagctttgatacggtggtcaaaggcttaaatgatttccctcgtgacgagtggccgcctttatttattcacacattatttaacggcatggttatcattggctcagtcctcattttgtttgcagtgttagcactgctttaccgtaaaattttaaaacgcgaacattatccgaagtggctcctttttctttacttattcggcgggccccttagtcttttggccattgagttcggctggatctttgcatgtacaggccgtcagccatgggtcatttatcgaatgctcaaaacctcagaggtcgtcacatcatccggttcaatcggtacgctctttatcctttttgccattgtctatctcatcttaggcatagcaaccgttattgtactgacgtactactttagaaaacattcgattgaagaagacctacggttaacagaatcttaaaaaggagcgatctagatgcaaatggatgttacaactgatgcgctcattgcaatcaccatcttatggggattcgtttttatctatgcagtgatggcatcaatggatttcggcgcaggattttggtcgatgatttatatgaatagagaacaaacaaaggccgctaatattgcaaataaatatctttctccaacatgggaagtgacaaacgtcttcattgtggcgattgttgtcgcattgtttagcttgtttccaggtgcgacctttgtacttggtaccgttttattaatacccggcagcatcatattgttacttcttgcactgcgaagcgggtttctcgtgttttctcattcactccctaaaaaataccgaaaagcggttacttacatttcagggataagcggctttatcattccgtccatcctgatcatggttcttccgattactcatggtggatttatctttcaggagaacaacgtctactcattagatcttggactggtctttacgagtgcaaatgtctattcttttgtcggctttgccattttcagcaccctttttctttcgtctttgcttttagctgatttctctaatgtggctgatgaagatgaagcttacagcatttatagaagaggggctctcattacgggtccgctttcactcttgatggccttttttatcatgctgacattaagaagcgaggccaattggctgttcacaaaaatgatgcagaacattcctattcttcttgtatcactcctgatgtttttgctagcaggactggctctatttttaccaaacagccggtttaagcagcggaaaggccggccccgtttagctgtcattgcgattaccattcaatattttttagcaagctacgtgtacggacgtgcccatttgccttatatggcctatccagatattacaatcatgtctggatttacagaccctgtcacatttagagcattgtttatcacctatatagtaggttttatcatcttattccctgggttctatttcttctggaaattgtttatgaaggataagcgctatattcgtcaggaagattaacatgaatggacgaggttcatttcggttacattatagaagaaagacatactcaaaaggaggtcatctgtatgagccaaaaaatcctttgtgaagtcaataactgttcctattggaatgctggaaaccgctgtggggcagatgcaatatatgtcgtcagccacacaggaaatacggctgaaaaaagtgaagaaacggattgtaaaacgtttaaaccacaagatctttaagtctcattaaaggaggcgcttcacattgaaacacgatcggctgcttcaaacgttttttgacgaaattcatgacgcggacgaagccgcattttatcaggctgctcactcctttttaaacctttgggattatgaatatggccatgcagcagacatgcccaatgaaatgaatcactatatcggacagcttgcttacgacagcgagcttgtagaagagtaagaaagagcggatcaccgctctttctttcttaatgagacaggaaggaaaaaactttctttcactatacatagattttattggatgtgcaaaaggtgattcactcgttttcacatcacaaaatcatgttttgtaaacacgtcaattttatctgaaaaagaacgaagcgcttgatagtccacttctacgcccattcctggggaacgaggtacctcaataaaaccattctcaaccttgatttcaggaaaaatgatatcttgctcccaatattttgatgaagctgaaatatcacctgggattgtaaattgaggaagggaagcaagtgccacgttctgcgcgcgggaaatgcctgtttcaatcatccctccgcaccataatggaatttgatgctccttactgaatgtatggattttaagggcttctgtcagccccccaactcgtgaaggcttcacattaataatttgacagctgccaagctctacagcttttctagcatcatctaaagaacaaatactttcatccaaacatatcggtgtttttaaatgcttttgcaaatggcgatgatccacgatatcatctgcagctaatggctgttcaatcattaataaacgaatgtcatcgagctgcttgagcttgctaatatcctttaattcataagcagagtttgcatccgccattaatggaaggttagggaaagactctctaatttttttaagaagtccaatatcctgtcccggcttaattttcaccttcacacgctgatagccttggtcaacatattgctgaatttgcttcagcatgtcgtcaatgggtcctaaccccgccacaacaccagaaggtattctctctttggtgccgcctaatacatcgcgtaacgacttattctcacgcttcgcataaatatcccaaacagccgcttcgattcccgctttcgccatcctattacctttaaattggtacaggctgtctggtatttctgaagggtgtgtaaaggtgcgtgtcagtacattcggtataaagaaagctctcagcatatgatagcaagtctcaatggtttcttctgtataccatggagaagaaaaggctgacacctctccccatccagtcaatcctgtttgatcttttacctcgacaataataaactcacgctctgagatggttccaagacttgttgtaaatggttgcttgagcttcatcgtgacatgatataaaatcactcgttcaatttgaatcatctaaaaacccctttgatcctgagtctgtgcctctgcaatttattcgacgcatttcttggcagctcgtccacaaagtgaaaagcggcgggccatttatattttgctaaatgcgactcacataaagcatagagctcattctccggtatcttatggtctgtgacaagaaaggcagccggtacctctccccatctatcatcatacatacccgtcactccggcttcttttacatgcggatgtgttaacagaaccgcttcaatttcagcaggataaatattctcaccgccagaaataattaaatctgaacggcggtcaagcacaaataagaacccttcctcatccacatagccaatatcaccagttttcagccagccttgatcaaaggcagctgtggtcgcttcttcacggtaaaggtaccctttcatgacatttgcccctttcaccataatttcgccatgctcaaaaggacgacaagtgcgtgtaccatcttgaatttttagctcacacccaaaaaggggttttcccgctgatccaagcttctctacactaaattcaggcgcaagggtcacaatttgtgaacaggtttccgtcataccgtacgattgaaacacagggaagcctttctctttgctttcttgaagcatcgcaaaaggcgcaggtcctccgcctaataaaagacagcgcaaagaagacgggcattcttccagtctgcttaataaacgggataacatcgtttgaacaacagatatcatcgtcacacgatgctgttcaatagaatcctttacttcatcgacatcaaacttctcatgaagtacgacagtcatcccatagatcacagacttaaataaagcggataacccgctaatatgaaaaagaggcagtgcaataagccagcggtcatcctctctgatgcccatattgagtgcagaggaaacggcactatgaaaatgattgccaaacgtttgctccacgccttttgggcgtcctgttgtgccagatgtatacatgatggtcgctgtttcattcaaatcaaattcgctctcgattttcttttcattatcttgacctgcttcaggtaaagtctccattgtataaacggggagatcacctttatgatcactggcataaacaggttcagttaataaagcggctgcttttgcatcttcaagctgatagcgcctctcagcttttgttaacttattgttcaatagcacgatttttaatcctaatgaaaaacaagcatgaacaagcatcaccatttgaggctgattgttcatcaaaagcccaaccgtttccccttttttcaatgatgcatctgcaagtctattagaaagctcatttacttcatcagctaaatcgcgaaatgtccactttttatcctgataaatgagcgcgactctttctggcgttaaataagcacggtacagcagccaattaggttgcttcatcatgacacctcctcttcttaaaagaaaacagcttagtctgatgcactaagctgtttttcatcgatatgattgaatcaagggaaacgcgggaactgaccgaagtcaggcttgcgtttttccttaaaggaatcgcgtccttcttttgcttcatctgttgtgtaataaagaagtgtcgcatctcctgcaaattgttgaattccagctaatccatccgtatctgcattaaatgcagccttcaagaatcgtaaagcagtcgggctcttttctagcatctcctcacaccacttcacagtttcttcttcaagctgctctaatggtacaactgtattgacaagtcccatatcaagcgcttcttgtgcattgtattgacggcataagtaccagatttctctcgctttcttatgaccaacaatacgtgcaaggtagcctgaaccataaccagcatcaaagctgcctacttttggaccagtttgtccaaaaatcgcattatctgctgcaattgtcaggtcacatacaacgtgaagaacgtgcccgccgccgattgcataaccagcaaccattgcaatcaccggttttggaatcacacgaatcaaacgctgtaagtctaatacatttagacgcggaatttgatcgtctcctacatagccgccatggccgcgtactttttgatccccaccagaacagaatgctttgccgccagctcctgcaagtacgattacaccaacatttgaattatcacgagcacgtgaaaatgcatcaattaattcactcacagtctttggtgtaaacgcgttatgtacatgtggacgattaatcgtgatctttgcgatcccattgtacgtttcatataaaatttcgtcatattgacgctcagtttgccattcaatagccatcaatagttcctcctctaatcttgcgtaataaactcacttactattttaccaaaaaaatgtggttgttccacatgaactgtatgcccagcctgctcagccaatatgaattgactgccttcaagctcctgctgcatacgtttggcgatattgcagaacttttcatcaagcgctccgcaaatcaacaaaacaggtaaattcatatgctttaaagccttccaaacagagggctgcgaacctgttcctaggccttctaagctgcgagccagtccaagtggattggctttcagccttccctctctcagttgagcctgcgtttcagctgataaagttttctgcgaagcaaacagtggaatactctcccaaaaatccacaaacttcactaaaccttcatgtctaagtttctgagcgagttgatgatcgtgtttgagtcttgccatccgctctttaaaagtgcgaagccctggagaggtactctcaaggaccaatttgttgacacgatctggataacgagaggcaaatgataaagcaatacgtcctcccatagaatatccgagaatattcactttgtgaagctttaattggtttaaaatctctgcaagatctgccagctgatgcgacatcgcatatcttctcatactttctggtgagtccgtgcggccatgtccaagcaagctgacttgaatcaatcttgtattcaccatataaccattcaagaacgtccaagaagccgcgcttccagtgaagccatgtaagcatagcgtggcattctcagccaatggattctgatccaccacctcgtacgccacaccatcacgcatccgtattatgaaagaagacattcttttttcacttcttccaatatgtcatccatcatttgacgatgtttgcttacacgagaatgccgatcagtttcaatttcaattaaatgaagtccaggctcttctatatgcgccatgtagacatcatgtaattcttgtttcgttgacggtttcgaataggttcccccatacagcttcgaagcatactcaaaattcagtccagtcggcgttccgaagagtttttcataatacggttcatcagacgcctgtggaagaaaagaaaagatgcctcccccatcattgtttaacaacacaaccgtcagcggaatgtccagcagcttagctgcaagcaaaccgttcatatcatgataaaatgataaatctccaatcactaaggtgactggctgtttcaaagccgcatacgtgccaagtgctgtagacacaacgccatcaatgccattggctcctcgattcgccatcatccgaaaaggcttcgattgcgcttcaaaaaatgtatccacatcacgaatcggcatactgtttccgataaaaaggacactctccttcggcaagagatgctgaagctgacggtacacatttccctcaaatgacagattctcatcagaataatgggatgcatgcgttctgaatgaagaattaacatactgccagcgttttagaaaacttgtatcctcacgttgatccgctctcttgaatacttcatctacaaaagttgccacatcactttcaatgacgtatgatgcactcaatccaggatctcgaaaacctccggcagcatcaacgacaatctgattcacttccacatgtttttccagccacttgaataaaggtttggacacaggcatcggtccaaaacgaatgaccatatccggcaatagatgctgctgcaatgcttcatctttcaataatgaatcatacgcatcaataataagatctgcatgttcatgaccatttcgcaaatgagaaagcgggtccgctaaaatcggaatatgcaaggctttcgaaagacgtaacactgcctctttctcttcctgcgtatgaagttcaccacacacaatcagtccctttttggaatggttcatgaccgtcacgatttcagacatcacatcatcatttgggaaagcctgtcctgcagctatgaccttttttcggcctgtttcttctcgctcaaaaggatcaatagacaaatcaggaagcaatggttctctcagagggacattgatctgaacaggtcccttcggctcttgcattgacatatgatttgctcttgccgcagccgtctgaacatagcgtaacatcgtctgactttcttctggcaatgctaagtctgtgaaccatttaacaaacttaccgaataagaattgctgatcaatcgcttgaggtgccccaacttccctcaattcgtgcggccgatcagcagttaaaacaataagtggtacacgggaataatgtgcctctacaatggctggataaaagttagcagctgccgtacctgatgtacaaataagcagcactggtgcttgacttgcttttgcaagaccaagcgcataaaaagcagcagaccgttcatccactaatacatgaacattgatgtcttgatgggcaagagccagcatcgcaagcggggttgaacgggaaccaggacagacaaccgcttccttcacaccaccttgtacaaattcatccatcaatctgccaatatatgttgtcatgatttgattattcaatcggacgacctccaagagcagatagcattggtcttaatttcacttgcgtttcctcgtactcctgctttgcaagggaatcctctacaatgccgcagccagcgaacaaacgaacatggtcttcctcaataagacctgaccgaatggcgacagcaaattctccattatcctgagagtcaatccagcccaccggcgccgcgtaccagccacgcttcaacggttcgatttcacgaatgacctcaaccgctttttccttaggatatccgcctaatgctggcgtcggatggagctgttcaattaatgaaaagagggaacagctgcttttaatttctcccacaatcggtgtaaacaaatgctgaatgttttttgttttataaagactaggttgatttggtttgtgcacgtgaaggcaattggcctcaaatgcttgctcaatcatattgacgacaatttgatgttcaatcaaattcttctcatcatgcagcagttcctcgcctaatgctcgatcttccgcttcatcttttcctcgaacaatcgaacctgctaaacaagatgaaaagacctcgccgccgcttttttttactaagcgttccggcgtagctccaacaaatgcttgtcttccttgttcaaccgcaaatacataactcgttgtttgatgctttaataattctgctaacagtggagcaagttcaatttgatttttatagtgaagcaagacttctcttgctaaaacaaccttttcatattcgtttgcacgaatgtggtctgtcgcttcttggatcgccttcatccattccttcacatctagttcttccatatgaacaagttcagcttgtccatcatgtctgagcggtaatgtttcgaaatgagaggctttttgttctaattcttgaatgagctgatgaacattcccgtccacctgcttccattcattgatcgtaagaaacgtgccttctttcgagacagtgagcatcatcgatggcacaaaaaaatgagcctcgccaaaagcttcccagtgacgcgccttctcttcatacggatcaaatgagaatcctccaaataaaagcggaccaacagccgcttgccttaactccttctcatcatgaaaatggaacatgtgctgcttcaactgttcccattcttgatggactatatcaaatcgttccttgccttgctcagttgatttaatgacggccgctctgccaagtccagaaaatatcatttggctttctggatcagaccaaaaaaaccgctcgcctaaaaaatccgcttcgccgc
